(19) United States
(12) Patent Application Publication
(10) Pub. No.: US 2005/0118606 A1
(43) Pub. Date: Jun. 2, 2005

(54) Methods for identifying risk of breast cancer and treatments thereof

(76) Inventors: Richard B. Roth, La Jolla, CA (US); Caridad Rosette, San Diego, CA (US); Mikhail F. Denissenko, Poway, CA (US); Matthew Roberts Nelson, San Marcos, CA (US); Rikard Reneland, San Diego, CA (US); Andreas Braun, San Diego, CA (US); Stefan M. Kammerer, San Diego, CA (US)

Correspondence Address: MORRISON & FOERSTER LLP, 3811 VALLEY CENTRE DRIVE, SUITE 500, SAN DIEGO, CA, 92130-2332, US

(21) Appl. No.: 10/723,670

(22) Filed: Nov. 25, 2003

Related U.S. Application Data
(60) Provisional application No. 60/429,136, filed on Nov. 25, 2002.
(60) Provisional application No. 60/490,234, filed on Jul. 24, 2003.
(60) Provisional application No. 60/467,823, filed on May 2, 2003.

(51) Int. Cl. C12Q 1/68; A61K 48/00

(52) U.S. Cl. 435/6; 514/44

(57) ABSTRACT

Provided herein are methods for identifying a risk of cancer in a subject and/or a subject at risk of cancer, reagents and kits for carrying out the methods, methods for identifying candidate therapeutics for treating cancer, and therapeutic methods for treating cancer in a subject. These embodiments are based upon an analysis of polymorphic variations in a KLF12 nucleic acid, which has a nucleotide sequence exemplified in SEQ ID NO: 1, 2 or 3.

### RELATED PATENT APPLICATIONS

[0001] This patent application claims the benefit of provisional patent application No. 60/429,136 filed Nov. 25, 2002 and provisional patent application No. 60/490,234 filed July 24, 2003, having attorney docket number 524593004100 and 524593004101, respectively. This patent application also claims the benefit of provisional patent application No. 60/467,823 filed May 2, 2003 and having attorney docket no.524593005200. Each of these provisional patent applications names Richard B. Roth et al as inventors and is hereby incorporated herein by reference in its entirety, including all drawings and cited publications and documents.

### FIELD OF THE INVENTION

[0002] The invention relates to genetic methods for identifying a risk of cancer and treatments specifically targeted to the disease.

### BACKGROUND

[0003] Breast cancer is the third most common cancer, and the most common cancer in women, as well as a cause of disability, psychological trauma, and economic loss. Breast cancer is the second most common cause of cancer death in women in the United States, in particular for women between the ages of 15 and 54, and the leading cause of cancer-related death (Forbes, Seminars in Oncology, vol.24(1), Suppl 1, 1997: pp.S1-20-S1-35). Indirect effects of the disease also contribute to the mortality from breast cancer including consequences of advanced disease, such as metastases to the bone or brain. Complications arising from bone marrow suppression, radiation fibrosis and neutropenic sepsis, collateral effects from therapeutic interventions, such as surgery, radiation, chemotherapy, or bone marrow transplantation-also contribute to the morbidity and mortality from this disease.

[0004] While the pathogenesis of breast cancer is unclear, transformation of normal breast epithelium to a malignant phenotype may be the result of genetic factors, especially in women under thirty (Miki, et al, Science, 266: 66-71 (1994)). However, it is likely that other, non-genetic factors also have a significant effect on the etiology of the disease. Regardless of its origin, breast cancer morbidity increases significantly if it is not detected early in its progression. Thus, considerable efforts have focused on the elucidation of early cellular events surrounding transformation in breast tissue. Such efforts have led to the identification of several potential breast cancer markers. For example, alleles of the BRCA1 and BRCA2 genes have been linked to hereditary and early-onset breast cancer (Wooster, et al.; Science, 265: 2088-2090 (1994)). However, BRCA1 is limited as a cancer marker because BRCA1 mutations fail to account for the majority of breast cancers (Ford et al., British J Cancer, 72: 805-812 (1995)). Similarly, the BRCA2 gene, which has been linked to forms of hereditary breast cancer, accounts for only a small portion of total breast cancer cases.

### SUMMARY

[0005] It has been discovered that multiple polymorphic variations in the KLF12 gene, which encodes a zinc finger repressor factor, and a region surrounding the gene, are associated with the occurrence of cancer, in particular breast cancer. Thus, featured herein are methods for identifying risk of cancer in a subject or a subject at risk of cancer, which comprises detecting the presence or absence of one or more polymorphic variations in a KLF12 nucleotide sequence in a nucleic acid sample from a subject, where the genomic KLF12 nucleotide sequence is set forth as SEQ ID NO: 1, and coding nucleotide sequences for two isoforms are set forth as SEQ ID NO: 2 or 3, or a substantially identical nucleotide sequence thereof. In certain embodiments, a polymorphic variation described hereafter is detected.

[0006] Also featured are methods for treating cancer in a subject by identifying subjects at risk of a cancer and treating the subject with a suitable treatment (e.g., administering a therapeutic molecule). In addition, featured are methods for preventing cancer in a subject by identifying subjects at risk of a cancer and implementing preventative measures before clinical signs of the disease first manifest.

[0007] Also featured herein are nucleic acids that encode a KLF12 polypeptide and include one or more polymorphic variants associated with cancer described hereafter, and oligonucleotides which hybridize to those nucleic acids. Also provided are polypeptides encoded by a KLF12 nucleic acid, which include a full-length isoform and a truncated isoform polypeptide, and fragments thereof. In addition, provided are methods for identifying candidate therapeutic molecules for treating cancer and related disorders, as well as methods of treating cancer in a subject by administering a therapeutic molecule described herein. In specific embodiments, the methods described herein are directed to specific types of cancer, which include but are not limited to breast cancer, prostate cancer and melanoma. Many embodiments described herein are directed to breast cancer.

[0008] Also provided are compositions comprising a breast cancer cell and/or a KLF12 nucleic acid, or a fragment or substantially identical nucleic acid thereof, with a RNAi, siRNA, antisense DNA or RNA, or ribozyme nucleic acid designed from a KLF12 nucleotide sequence. In an embodiment, the nucleic acid is designed from a KLF12 nucleotide sequence that includes one or more breast cancer associated polymorphic variations, and in some instances, specifically interacts with such a nucleotide sequence. Further, provided are arrays of nucleic acids bound to a solid surface, in which one or more nucleic acid molecules of the array have a KLF12 nucleotide sequence, or a fragment or substantially identical nucleic acid thereof, or a complementary nucleic acid of the foregoing. Featured also are compositions comprising a breast cancer cell and/or a KLF12 polypeptide, with an antibody that specifically binds to the polypeptide. In an embodiment, the antibody specifically binds to an epitope in the polypeptide that includes a non-synonymous amino acid modification associated with breast cancer (e.g., results in an amino acid substitution in the encoded polypeptide associated with breast cancer).

### BRIEF DESCRIPTION OF THE DRAWINGS

[0009] FIGS. 1A-1YYYY depict a nucleotide sequence of a KLF12 gene and surrounding region.

[0010] Two transcript variants encoding different isoforms have been identified for KLF12: a full-length (FL) form, or isoform a, and a truncated (TR) form, or isoform b. The full-length form comprises a molecule approximately 402 amino acids in length, and the truncated form comprises a molecule approximately 269 amino acids in length. Polynucleotide sequences encoding both the FL and TR forms of KLF12 are provided in FIGS. 2A-2B, respectively. FIG. 2A depicts the FL form of KLF12 cDNA reported as SEQ ID NO: 2. FIG. 2B depicts the TR form of KLF12 cDNA reported as SEQ ID NO: 3. Polypeptide sequences of both the FL and TR forms of KLF12 are provided in FIGS. 3A-3B, respectively. FIG. 3A depicts the FL form of KLF12 polypeptide reported as SEQ ID NO: 4. FIG. 3B depicts the TR form of KLF12 polypeptide reported as SEQ ID NO: 5. The following nucleotide representations are used throughout the specification and figures: “A” or “a” is adenosine, adenine, or adenylic acid; “C” or “c” is cytidine, cytosine, or cytidylic acid; “G” or “g” is guanosine, guanine, or guanylic acid; “T” or “t” is thymidine, thymine, or thymidylic acid; and “I” or “i” is inosine, hypoxanthine, or inosinic acid. SNPs are designated by the following convention: “R” represents A or G, “M” represents A or C; “W” represents A or T; “Y” represents C or T; “S” represents C or G; “K” represents G or T; “V” represents A, C or G; “H” represents A, C, or T; “D” represents A, G, or T; “B” represents C, G, or T; and “N” represents A, G, C, or T.

[0011] FIG. 4 shows expression of KLF12 FL, KLF12 TR, and AP2 is cells.

[0012] FIG. 5 depicts siRNA inhibition of KLF gene expression.

[0013] FIG. 6 illustrates effects of siRNA on T-47D cell proliferation.

[0014] FIG. 7 shows effects of siRNA on MCF-7 cell proliferation.

[0015] FIG. 8 depicts effects of siKLF on T-47D cell proliferation according to a Wst-1 assay.

[0016] FIG. 9 illustrates effects of siKLF on T-47D cell proliferation according to a CyQuant assay.

[0017] FIG. 10 shows morphologies of siRNA-transfected MCF-7 cells.

[0018] FIG. 11 shows effects of siRNA on proliferation of melanoma and prostate cancer cells.

[0019] FIG. 12 illustrates apoptosis of cells by cell staining.

[0020] FIG. 13 shows show proximal SNPs in and around the KLF12 gene for females. The position of each SNP on the chromosome is shown on the x-axis and the y-axis provides the negative logarithm of the p-value comparing the estimated allele to that of the control group. Also shown are the exons and introns of the genes in the approximate chromosomal positions. The graph indicates polymorphic variants associated with breast cancer in regions spanning positions 78265 to 123880 in SEQ ID NO: 1, spanning positions 78265 to 96535 in SEQ ID NO: 1, or spanning positions 117297 to 123880 in SEQ ID NO: 1 are in linkage disequilibrium.

### DETAILED DESCRIPTION

[0021] It has been discovered that a number of polymorphic variants in and around a nucleotide sequence encoding a zinc finger transcriptional repressor, known as Kruppel-like factor 12 (KLF12), is associated with the occurrence of cancer. KLF12 is a developmentally-regulated transcription factor and important regulator of gene expression during embryonic and adult tissue differentiation (Roth et al. Genomics 63:384-390 (2000)). The protein encoded by this gene is a member of the Kruppel-like zinc finger protein family that represses expression of the AP-2 alpha (AP-2a) gene by binding to a specific site in the AP-2a gene promoter. AP-2a is a developmentally regulated transcription factor that is involved in epidermal cell proliferation, and accordingly plays an important role in human cancer (Bosher et al PNAS 92:744-747 (1995)). It has been reported that KLF12 binds to regulatory element A32 in the AP-2alpha gene promoter and represses its expression by excluding a positive factor, KLF9 (Imhof, A. et al. Molec. Cell. Biol. 19: 194-204, 1999). A variant of KLF12, which was isolated from hematopoetic stem cell progenitor cells, encodes a truncated (TR) isoform, which lacks the zinc finger DNA binding domain. Its function is unknown.

[0022] The transcription factor, AP-2, is an inducer of c-erbB2 oncogene expression in a nontumorigenic mammary epithelial cell line (ZR-75-1). A complex of AP-2a also stimulates the expression of IGF-1R and ER in mammary carcinoma cells. AP-2a is also known to induce bcl-2, an apoptosis suppressor. All these roles of AP-2a are relevant to the hyperproliferation associated with cancer. On the other hand, AP-2a is demonstrated to induce the cyclin dependent kinase inhibitor, p21WAF1/CIP1, resulting in cell cycle arrest (Zeng Y X et al. Nat Genet 1997 Jan.;15(1):78-82). This function of AP-2a may account of its tumor suppressor activity in cancer, including, but not limited to, primary breast cancer, malignant melanoma, and prostate cancer.

[0023] Featured herein is a polymorphic variant of KLF12 associated with an increased risk of cancer occurrence, which is useful for the early identification of cancer or a predisposition to cancer. A predisposition to cancer sometimes is indicative of a subject's increased susceptibility to developing cancer despite common environmental risk factors, or it sometimes is indicative of a subject's increased risk of developing aggressive forms of cancer more likely to metastasize or invade surrounding tissues, thus making the disease more difficult to treat. Accordingly, methods for treating or preventing cancer in a subject with a predisposition to cancer are described herein. Also featured herein are nucleic acids and fragments thereof that include one or more polymorphic variations associated with the occurrence of cancer, as well as polypeptides encoded by these nucleic acids. Also, associating KLF12 polymorphic variants with cancer has provided new, novel targets for design or discovery of therapeutic agents for cancer.

[0024] Cancers and Sample Selection

[0025] The term “cancer” as used herein refers to a condition characterized by uncontrolled, abnormal growth of cells. Examples of cancer include but are not limited to, carcinoma, lymphoma, blastoma, sarcoma, and leukemia. More particular examples of such cancers include breast cancer, prostate cancer, colon cancer, squamous cell cancer, small-cell lung cancer, non-small cell lung cancer, ovarian cancer, cervical cancer, gastrointestinal cancer, pancreatic cancer, glioblastoma, liver cancer, bladder cancer, hepatoma, colorectal cancer, uterine cervical cancer, endometrial carcinoma, salivary gland carcinoma, kidney cancer, vulval cancer, thyroid cancer, hepatic carcinoma, skin cancer, melanoma, brain cancer, ovarian cancer, neuroblastoma, myeloma, various types of head and neck cancer, acute lymphoblastic leukemia, acute myeloid leukemia, Ewing sarcoma and peripheral neuroepithelioma. In specific embodiments, the cancer is breast cancer, prostate cancer or melanoma. All of the possible cancers listed herein are included in, or may be excluded from, the present invention as individual species.

[0026] Abnormal cells resulting from cancer are referred to as “neoplastic cells,” which are transformed cells that can form a solid tumor. The term “tumor” refers to an abnormal mass or population of cells (i.e., two or more cells) that result from excessive or abnormal cell division, whether malignant or benign, and pre-cancerous and cancerous cells. Malignant tumors are distinguished from benign growths or tumors in that, in addition to uncontrolled cellular proliferation, they can invade surrounding tissues and can metastasize.

[0027] The term “invasion” as used herein refers to the spread of cancerous cells to adjacent surrounding tissues. The term “metastasis” as used herein refers to a process in which cancer cells travel from one organ or tissue to another non-adjacent organ or tissue. Cancer cells in the breast can spread to tissues and organs of a subject, and conversely, cancer cells from other organs or tissue can invade or metastasize to a breast. Cancerous cells from the breast may invade or metastasize to any other organ or tissue of the body. Breast cancer cells often invade lymph node cells and/or metastasize to the lung, liver, brain and/or bone and spread cancer in these tissues and organs. Breast cancers can spread to other organs and tissues and cause breast cancer, prostate cancer, colon cancer, ovarian cancer, cervical cancer, gastrointestinal cancer, pancreatic cancer, glioblastoma, bladder cancer, hepatoma, colorectal cancer, uterine cervical cancer, endometrial carcinoma, salivary gland carcinoma, kidney cancer, vulval cancer, thyroid cancer, hepatic carcinoma, skin cancer, melanoma, ovarian cancer, neuroblastoma, myeloma, various types of head and neck cancer, acute lymphoblastic leukemia, acute myeloid leukemia, Ewing sarcoma and peripheral neuroepithelioma, and other carcinomas, lymphomas, blastomas, sarcomas, and leukemias.

[0028] Breast cancer is the rapid proliferation of abnormal cells in one or both of the breasts. While normal breast tissue cells reproduce and develop into healthy breast tissue, these abnormal cells proliferate rapidly and rarely form normal breast tissue. Instead, the abnormal cells proliferate, form tumors, and disrupt the breast, thereby decreasing breast function and eventually leading to death. There is a dire need for improved diagnostics and treatments directed to breast cancer. Currently there are 180,000 new cases of breast cancer diagnosed per year in the United States.

[0029] As used herein, the term “breast cancer” refers to a condition characterized by anomalous rapid proliferation of abnormal cells in one or both breasts of a subject. In breast cancer, neoplastic cells often are identified in one or both breasts only and not in another tissue or organ, in one or both breasts and one or more adjacent tissues or organs (e.g. lymph node), or in a breast and one or more non-adjacent tissues or organs to which the breast cancer cells have metastasized.

[0030] Breast cancers arise most commonly in the lining of the milk ducts of the breast (ductal carcinoma), or in the lobules where breast milk is produced (lobular carcinoma). Other forms of breast cancer include Inflammatory Breast Cancer and Recurrent Breast Cancer. Inflammatory Breast Cancer is a rare, but very serious, aggressive type of breast cancer. The breast may look red and feel warm with ridges, welts, or hives on the breast; or the skin may look wrinkled. It is sometimes misdiagnosed as a simple infection. Recurrent disease means that the cancer has come back after it has been treated. It may come back in the breast, in the soft tissues of the chest (the chest wall), or in another part of the body. As used herein, the term “breast cancer” may include both Inflammatory Breast Cancer and Recurrent Breast Cancer.

[0031] In an effort to detect breast cancer as early as possible, women regularly undergo physical exams and screening mammograms. A diagnostic mammogram is performed to evaluate a breast complaint or abnormality detected by physical exam or routine screening mammography. If an abnormality seen with diagnostic mammography is suspicious, additional breast imaging (with exams such as ultrasound) or a biopsy may be ordered. A biopsy followed by pathological (microscopic) analysis is the only definitive way to determine whether a woman has breast cancer. Excised breast cancer samples are often subjected to the following analyses: diagnosis of the breast tumor and confirmation of its malignancy; maximum tumor thickness; assessment of completeness of excision of invasive and in situ components and microscopic measurements of the shortest extent of clearance; level of invasion; presence and extent of regression; presence and extent of ulceration; histological type and special variants; pre-existing lesion; mitotic rate; vascular invasion; neurotropism; cell type; tumor lymphocyte infiltration; and growth phase.

[0032] The stage of a breast cancer can be classified as a range of stages from Stage 0 to Stage IV based on its size and the extent to which it has spread. The following table summarizes the stages:

TABLE 1

| | | Lymph Node | |
|---|---|---|---|
| Stage | Tumor Size | Involvement | Metastasis (Spread) |
| I | Less than 2 cm | No | No |
| II | Between 2-5 cm | No, or in same side of | No |
| | | breast | |
| III | More than 5 cm | Yes, on same side of | No |
| | | breast | |
| IV | Not applicable | Not applicable | Yes |

[0033] Stage 0 cancer is a contained cancer that has not spread beyond the breast ductal system. Fifteen to twenty percent of breast cancers detected by clinical examinations or testing are in Stage 0 (the earliest form of breast cancer). Two types of Stage 0 cancer are lobular carcinoma in situ (LCIS) and ductal carcinoma in situ (DCIS). LCIS indicates high risk for breast cancer. Many physicians do not classify LCIS as a malignancy and often encounter LCIS by chance on breast biopsy while investigating another area of concern. While the microscopic features of LCIS are abnormal and are similar to malignancy, LCIS does not behave as a cancer (and therefore is not treated as a cancer). LCIS is merely a marker for a significantly increased risk of cancer anywhere in the breast. However, bilateral simple mastectomy may be occasionally performed if LCIS patients have a strong family history of breast cancer. In DCIS the cancer cells are confined to milk ducts in the breast and have not spread into the fatty breast tissue or to any other part of the body (such as the lymph nodes). DCIS often are detected on mammograms as tiny specks of calcium (known as microcalcifications) 80% of the time. Less commonly DCIS can present itself as a mass with calcifications (15% of the time); and even less likely as a mass without calcifications (<5% of the time). Breast biopsy is used to confirm DCIS. Standard DCIS treatment is breast-conserving therapy (BCT): lumpectomy followed by radiation treatment or mastectomy.

[0034] In Stage I, the primary (original) cancer is 2 cm or less in diameter and has not spread to the lymph nodes.

[0035] In Stage IIA, the primary tumor is between 2 and 5 cm in diameter and has not spread to the lymph nodes. In Stage IIB, the primary tumor is between 2 and 5 cm in diameter and has spread to the axillary (underarm) lymph nodes; or the primary tumor is over 5 cm and has not spread to the lymph nodes.

[0036] In Stage IIIA, the primary breast cancer of any kind that has spread to the axillary (underarm) lymph nodes and to axillary tissues. In Stage IIIB, the primary breast cancer is any size, has attached itself to the chest wall, and has spread to the pectoral (chest) lymph nodes.

[0037] In Stage IV, the primary cancer has spread out of the breast to other parts of the body (such as bone, lung, liver, brain). The treatment of Stage IV breast cancer focuses on extending survival time and relieving symptoms.

[0038] Based in part upon selection criteria set forth above, individuals having breast cancer can be selected for genetic studies. Also, individuals having no history of cancer or breast cancer can be selected as controls for genetic studies. Other selection criteria may include: the sample was derived from a Caucasian; the sample was derived from an individual of German paternal and maternal descent; the case samples were derived from individuals diagnosed with breast cancer; the control samples were derived from individuals free of cancer and no family history of breast cancer; and sufficient genomic DNA was extracted from each blood sample for all allelotyping and genotyping reactions performed during the study. Phenotype information includes pre- or post-menopausal onset, familial predisposition to cancer or breast cancer, country or origin of mother and father, diagnosis with breast cancer (date of primary diagnosis, age of individual as of primary diagnosis, grade or stage of development, occurrence of metastases, e.g., lymph node metastases, organ metastases), condition of body tissue (skin tissue, breast tissue, ovary tissue, peritoneum tissue and myometrium), or method of treatment (e.g., surgery, chemotherapy, hormone therapy, radiation therapy).

[0039] Polymorphic Variants Associated with Breast Cancer

[0040] Genetic analysis provided herein linked breast cancer with a polymorphic variant of a nucleotide sequence located on chromosome thirteen that encodes a zinc finger repressor factor polypeptide designated KLF12. As used herein, the term “polymorphic site” refers to a region in a nucleic acid at which two or more alternative nucleotide sequences are observed in a significant number of nucleic acid samples from a population of individuals. A polymorphic site may be a nucleotide sequence of two or more nucleotides, an inserted nucleotide or nucleotide sequence, a deleted nucleotide or nucleotide sequence, or a microsatellite, for example. A polymorphic site that is two or more nucleotides in length sometimes is 3, 4, 5, 6, 7, 8, 9, 10, 11, 12, 13, 14, 15 or more, 20 or more, 30 or more, 50 or more, 75 or more, 100 or more, 500 or more, or about 1000 nucleotides in length, where all or some of the nucleotide sequences differ within the region. A polymorphic site is often one nucleotide in length, which is referred to herein as a “single nucleotide polymorphism” or a “SNP.”

[0041] Where there are two, three, or four alternative nucleotide sequences at a polymorphic site, each nucleotide sequence is referred to as a “polymorphic variant.” Where two polymorphic variants exist, for example, the polymorphic variant represented in a minority of samples from a population is sometimes referred to as a “minor allele” and the polymorphic variant that is more prevalently represented is sometimes referred to as a “major allele.” Many organisms possess a copy of each chromosome (e.g., humans), and those individuals who possess two major alleles or two minor alleles are often referred to as being “homozygous” with respect to the polymorphism, and those individuals who possess one major allele and one minor allele are normally referred to as being “heterozygous” with respect to the polymorphism. Individuals who are homozygous with respect to one allele are sometimes predisposed to a different phenotype as compared to individuals who are heterozygous or homozygous with respect to another allele.

[0042] Furthermore, a genotype or polymorphic variant sometimes is expressed in terms of a “haplotype,” which as used herein refers to two or more polymorphic variants occurring within genomic DNA in a group of individuals within a population. For example, two SNPs may exist within a gene where each SNP position includes a cytosine variation and an adenine variation. Certain individuals in a population may carry one allele (heterozygous) or two alleles (homozygous) having the gene with a cytosine at each SNP position. As the two cytosines corresponding to each SNP in the gene travel together on one or both alleles in these individuals, the individuals can be characterized as having a cytosine/cytosine haplotype with respect to the two SNPs in the gene.

[0043] As used herein, the term “phenotype” refers to a trait which can be compared between individuals, such as presence or absence of a condition, a visually observable difference in appearance between individuals, metabolic variations, physiological variations, variations in the function of biological molecules, and the like. An example of a phenotype is occurrence of cancer, or a specific type of cancer such as breast cancer.

[0044] Researchers sometimes report a polymorphic variant in a database without determining whether the variant is represented in a significant fraction of a population. Because a subset of these reported polymorphic variants are not represented in a statistically significant portion of the population, some of them are sequencing errors and/or not biologically relevant. Thus, it is often not known whether a reported polymorphic variant is statistically significant or biologically relevant until the presence of the variant is detected in a population of individuals and the frequency of the variant is determined. Methods for detecting a polymorphic variant in a population are described herein, specifically in Example 2. A polymorphic variant is statistically significant and often biologically relevant if it is represented in 5% or more of a population, sometimes 10% or more, 15% or more, or 20% or more of a population, and often 25% or more, 30% or more, 35% or more, 40% or more, 45% or more, or 50% or more of a population.

[0045] A polymorphic variant sometimes is detected on either or both strands of a double-stranded nucleic acid. Also, a polymorphic variant sometimes is located within an intron or exon of a gene or within a portion of a regulatory region such as a promoter, a 5′ untranslated region (UTR), a 3′ UTR, and in DNA (e.g., genomic DNA (GDNA) and complementary DNA (cDNA)), RNA (e.g., mRNA, tRNA, and rRNA), or a polypeptide. Polymorphic variations may or may not result in detectable differences in gene expression, polypeptide structure, or polypeptide function.

[0046] For duplex DNA, a polymorphic variation may be reported from one strand or its complementary strand. For example, a cytosine at position 96535 in SEQ ID NO: 1 can be reported as a guanine from the complementary strand. Also, while polymorphic variations at all positions within a haplotype often are reported from the same strand orientation, polymorphic variations at certain positions within a haplotype sometimes are reported from one strand orientation while others are reported from the other. The latter sometimes occurs even though it is understood by the person of ordinary skill in the art that polymorphic variants in a haplotype occur within one strand in a nucleic acid. Where a haplotype is reported from mixed strand orientations, a person of ordinary skill in the art can determine the orientation of each polymorphic variation in the haplotype by analyzing the orientation of each extension oligonucleotide utilized to identify each polymorphic variation.

[0047] In the genetic analysis that associated a polymorphic variation in KLF12 with breast cancer, samples from individuals having breast cancer and individuals not having breast cancer were allelotyped and genotyped. The term “genotyped” as used herein refers to a process for determining a genotype of one or more individuals, where a “genotype” is a representation of one or more polymorphic variants in a population. It was determined that both alleleic variants of the single nucleotide polymorphism (SNP) located in KLF12 nucleic acid at position 96535 in SEQ ID: 1 were present in the set of individuals tested in the genetic analysis described in Examples hereafter.

[0048] Additional Polymorphic Variants Associated with Breast Cancer

[0049] Also provided is a method for identifying polymorphic variants proximal to an incident, founder polymorphic variant. Thus, featured herein are methods for identifying one or more additional polymorphic variants associated with breast cancer, which comprise (a) providing a first polymorphic variant associated with breast cancer; (b) discovering or identifying (e.g. discovering a SNP that is not known or identifying a SNP that is known) at least a second polymorphic variant within a region in a nucleic acid including the first polymorphic variant, where the nucleic acid comprises: (i) a polynucleotide sequence set forth in FIG. 1 or FIGS. 2A-2B; (ii) a polynucleotide sequence that is 90% identical to a nucleotide sequence set forth in FIGS. 1A-1YYYY or FIGS. 2A-2B; (iii) a polynucleotide sequence that encodes a polypeptide having an amino acid sequence that is 90% identical to an amino acid sequence encoded by a nucleotide sequence set forth in FIGS. 1A-1YYYY or FIGS. 2A-2B; or (iv) a fragment of a polynucleotide sequence of (i), (ii), or (iii) comprising the polymorphic site; and (c) determining if the second polymorphic variant or other polymorphic variants is associated with cancer. In the above-described method, the identified second polymorphic variant sometimes is a known polymorphic variant as identified in a publicly available database. In certain embodiments, the first polymorphic variant is a polymorphic variation at position 96535 of SEQ ID NO: 1. In another embodiment, the first polymorphic variant is a polymorphic variation identified in Table 10 or Table 12. The region may be of any length, and in certain embodiments, the region is about 50 kb flanking the first polymorphic variant (e.g. about 50 kb 5′ of the first polymorphic variant and about 50 kb 3′ of the first polymorphic variant), and the region sometimes is composed of shorter flanking sequences, such as flanking sequences of about 40 kb, about 30 kb, about 25 kb, about 20 kb, about 15 kb, about 10 kb, about 7 kb, about 5 kb, or about 2 kb 5′ and 3′ of the first polymorphic variant. In certain embodiments, polymorphic variants associated with cancer are identified iteratively. For example, a third polymorphic variant can be identified or discovered in a region including the second polymorphic variant, and it can be determined whether the third polymorphic variant is associated with cancer. In another example, a fourth polymorphic variant can be identified or discovered in a region comprising the third polymorphic variant and it can be determined whether the third polymorphic variant is associated with cancer. In an embodiment, methods for determining if the polymorphic variant or other polymorphic variants are associated with cancer are directed to specific types of cancer, which include, but are not limited to, breast cancer, prostate cancer or melanoma.

[0050] The methods described herein are useful for identifying or discovering additional polymorphic variants that can be used to further characterize a gene, region or loci that are associated with a condition, a disease (e.g., cancer), or a disorder. For example, allelotyping or genotyping data from the additional polymorphic variants sometimes are used to identify a functional mutation or a region of linkage disequilibrium.

[0051] In certain embodiments, polymorphic variants identified or discovered within a region comprising the first polymorphic variant associated with cancer can be genotyped using the genetic methods and sample selection techniques described herein, and it can be determined whether those polymorphic variants are in linkage disequilibrium with the first polymorphic variant. The size of the region in linkage disequilibrium with the first polymorphic variant also can be assessed using these genotyping methods. Thus, provided herein are methods for determining whether a polymorphic variant is in linkage disequilibrium with a first polymorphic variant associated with cancer, and such information can be used in prognosis methods described herein.

[0052] Isolated KLF12 Nucleic Acids and Variants Thereof

[0053] Featured herein are isolated KLF12 nucleic acids, which include the genomic nucleic acids having the nucleotide sequence of SEQ ID NO: 1, the coding nucleic acids having the nucleotide sequence of SEQ ID NO: 2 which codes for full-length KLF12, the coding nucleic acid having the nucleotide sequence of SEQ ID NO: 3 which codes for truncated KLF12, KLF12 nucleic acid variants, and substantially identical nucleic acids to the foregoing. Nucleotide sequences of the KLF12 nucleic acids are sometimes referred to herein as “KLF12 nucleotide sequences.” A “KLF12 nucleic acid variant” refers to one allele that may have different polymorphic variations as compared to another allele in another subject or the same subject. A polymorphic variation in the KLF12 nucleic acid variant can be represented on one or both strands in a double-stranded nucleic acid or on one chromosomal complement (heterozygous) or both chromosomal complements (homozygous). A KLF12 nucleic acid may comprise any of the polymorphic variations described in Table 10 or Table 12. In addition, a nucleic acid complementary to the nucleic acids described in Table 10 or Table 12 may comprise the complementary base at the same polymorphic position, e.g., a cytosine at position 96535 of SEQ ID NO: 1 or a guanine at the same position in the complementary strand of nucleic acid.

[0054] As used herein, the term “nucleic acid” includes DNA molecules (e.g., a complementary DNA (cDNA) and genomic DNA (gDNA)) and RNA molecules (e.g., mRNA, rRNA, tRNA and siRNA) and analogs of DNA or RNA, for example, by use of nucleotide analogs. The nucleic acid molecule can be single-stranded and it is often double-stranded. The term “isolated or purified nucleic acid” refers to nucleic acids that are separated from other nucleic acids present in the natural source of the nucleic acid. For example, with regard to genomic DNA, the term “isolated” includes nucleic acids which are separated from the chromosome with which the genomic DNA is naturally associated. An “isolated” nucleic acid is often free of sequences which naturally flank the nucleic acid (i.e., sequences located at the 5′ and/or 3′ ends of the nucleic acid) in the genomic DNA of the organism from which the nucleic acid is derived. For example, in various embodiments, the isolated nucleic acid molecule can contain less than about 5 kb, 4 kb, 3 kb, 2 kb, 1 kb, 0.5 kb or 0.1 kb of 5′ and/or 3′ nucleotide sequences the nucleic acid molecule in genomic DNA of the cell from which the nucleic acid is derived. Moreover, an “isolated” nucleic acid molecule, such as a cDNA molecule, can be substantially free of other cellular material, or culture medium when produced by recombinant techniques, or substantially free of chemical precursors or other chemicals when chemically synthesized. As used herein, the term “KLF12 gene” refers to a nucleotide sequence that encodes a KLF12 polypeptide.

[0055] Also included herein are nucleic acid fragments. These fragments are often a nucleotide sequence identical to a nucleotide sequence in SEQ ID NOs: 1, 2 or 3, a nucleotide sequence substantially identical to a nucleotide sequence in SEQ ID NOs: 1, 2 or 3, or a nucleotide sequence that is complementary to the foregoing. The nucleic acid fragment is identical, substantially identical or homologous to a nucleotide sequence in an exon or an intron in SEQ ID NO: 1, or to a nucleotide sequence in an exon in SEQ ID NO: 2 or 3, and may encode a domain or part of a domain or motif of a KLF12 polypeptide. Domains and motifs of a KLF12 polypeptide include, but are not limited to, a zinc finger, C2H2 type, which corresponds to amino acid positions 378-395 of SEQ ID NO: 4. Sometimes, the fragment will comprises the polymorphic variation described herein as being associated with breast cancer. The nucleic acid fragment is often 50, 100, or 200 or fewer base pairs in length, and is sometimes about 300, 400, 500, 600, 700, 800, 900, 1000, 1100, 1200, 1300, 1400, 1500, 1600, 1700, 1800, 1900, 2000, 2100, 2200, 2300, 2400, 2500, 2600, 2700, 2800, 2900, 3000, 3100, 3200, 3300, 3400, 3500, 3600, 3800, 4000, 5000, 6000, 7000, 8000, 9000, 10000, 15000, 20000, 30000, 40000, 50000, 60000, 70000, 80000, 90000, 100000, 110000, 120000, 130000, 140000, 150000, 200000, 250000, 300000, 350000, 400000 or 4500000 base pairs in length. A nucleic acid fragment that is complementary to a nucleotide sequence identical or substantially identical to the nucleotide sequence of SEQ ID NOs: 1, 2 or 3 and hybridizes to such a nucleotide sequence under stringent conditions is often referred to as a “probe.” Nucleic acid fragments often include one or more polymorphic sites, or sometimes have an end that is adjacent to a polymorphic site as described hereafter.

[0056] An example of a nucleic acid fragment is an oligonucleotide. As used herein, the term “oligonucleotide” refers to a nucleic acid comprising about 8 to about 50 covalently linked nucleotides, often comprising from about 8 to about 35 nucleotides, and more often from about 10 to about 25 nucleotides. The backbone and nucleotides within an oligonucleotide may be the same as those of naturally occurring nucleic acids, or analogs or derivatives of naturally occurring nucleic acids, provided that oligonucleotides having such analogs or derivatives retain the ability to hybridize specifically to a nucleic acid comprising a targeted polymorphism. Oligonucleotides described herein sometimes are used as hybridization probes or as components of prognostic or diagnostic assays, for example, as described herein.

[0057] Oligonucleotides are often synthesized using standard methods and equipment, such as the ABI™3900 High Throughput DNA Synthesizer and the EXPEDITE™8909 Nucleic Acid Synthesizer, both of which are available from Applied Biosystems (Foster City, Calif.). Analogs and derivatives are exemplified in U.S. Pat. Nos. 4,469,863; 5,536,821; 5,541,306; 5,637,683; 5,637,684; 5,700,922; 5,717,083; 5,719,262; 5,739,308; 5,773,601; 5,886,165; 5,929,226; 5,977,296; 6,140,482; WO 00/56746; WO 01/14398, and related publications. Methods for synthesizing oligonucleotides comprising such analogs or derivatives are disclosed, for example, in the patent publications cited above and in U.S. Pat. Nos. 5,614;622; 5,739,314; 5,955,599; 5,962,674; 6,117,992; in WO 00/75372; and in related publications.

[0058] Oligonucleotides may also be linked to a second moiety. The second moiety sometimes is an additional nucleotide sequence such as a tail sequence (e:g., a polyadenosine tail), an adapter sequence (e.g., phage M13 universal tail sequence), and others. Alternatively, the second moiety may be a non-nucleotide moiety such as a moiety which facilitates linkage to a solid support or a label to facilitate detection of the oligonucleotide. Such labels include, without limitation, a radioactive label, a fluorescent label, a chemiluminescent label, a paramagnetic label, and the like. The second moiety may be attached to any position of the oligonucleotide, provided the oligonucleotide can hybridize to the nucleic acid comprising the polymorphism.

[0059] Uses for Nucleic Acid Sequence

[0060] Nucleic acid coding sequences depicted in FIG. 1 or FIGS. 2A or 2B may be used for diagnostic purposes for detection and control of polypeptide expression. Also, included herein are oligonucleotide sequences such as antisense RNA, small-interfering RNA (siRNA), DNA molecules and ribozymes that function to inhibit translation of a polypeptide. Antisense techniques and RNA interference techniques are known in the art and are described herein.

[0061] Ribozymes are enzymatic RNA molecules capable of catalyzing the specific cleavage of RNA. The mechanism of ribozyme action involves sequence specific hybridization of the ribozyme molecule to complementary target RNA, followed by a endonucleolytic cleavage. Ribozymes may be engineered hammerhead motif ribozyme molecules that specifically and efficiently catalyze endonucleolytic cleavage of RNA sequences corresponding to or complementary to the nucleotide sequences set forth in FIGS. 1A-1YYYY or FIGS. 2A-2B. Specific ribozyme cleavage sites within any potential RNA target are initially identified by scanning the target molecule for ribozyme cleavage sites which include the following sequences, GUA, GUU and GUC. Once identified, short RNA sequences of between fifteen (15) and twenty (20) ribonucleotides corresponding to the region of the target gene containing the cleavage site may be evaluated for predicted structural features such as secondary structure that may render the oligonucleotide sequence unsuitable. The suitability of candidate targets may also be evaluated by testing their accessibility to hybridization with complementary oligonucleotides, using ribonuclease protection assays.

[0062] Antisense RNA and DNA molecules, siRNA and ribozymes may be prepared by any method known in the art for the synthesis of RNA molecules. These include techniques for chemically synthesizing oligodeoxyribonucleotides well known in the art such as solid phase phosphoramidite chemical synthesis. Alternatively, RNA molecules may be generated by in vitro and in vivo transcription of DNA sequences encoding the antisense RNA molecule. Such DNA sequences may be incorporated into a wide variety of vectors which incorporate suitable RNA polymerase promoters such as the T7 or SP6 polymerase promoters. Alternatively, antisense cDNA constructs that synthesize antisense RNA constitutively or inducibly, depending on the promoter used, can be introduced stably into cell lines.

[0063] DNA encoding a polypeptide also may have a number of uses for the diagnosis of diseases, including cancer, often breast cancer, resulting from aberrant expression of the enzyme. For example, the nucleic acid sequence may be used in hybridization assays of biopsies or autopsies to diagnose abnormalities of expression or function (e.g., Southern or Northern blot analysis, in situ hybridization assays).

[0064] Expression Vectors, Host Cells, and Genetically Engineered Cells

[0065] Provided herein are nucleic acid vectors, often expression vectors, which contain a KLF12 nucleic acid. As used herein, the term “vector” refers to a nucleic acid molecule capable of transporting another nucleic acid to which it has been linked and can include a plasmid, cosmid, or viral vector. The vector can be capable of autonomous replication or it can integrate into a host DNA. Viral vectors may include replication defective retroviruses, adenoviruses and adeno-associated viruses for example.

[0066] A vector can include a KLF12 nucleic acid in a form suitable for expression of the nucleic acid in a host cell. The recombinant expression vector often includes one or more regulatory sequences operatively linked to the nucleic acid sequence to be expressed. The term “regulatory sequence” includes promoters, enhancers and other expression control elements (e.g., polyadenylation signals). Regulatory sequences include those that direct constitutive expression of a nucleotide sequence, as well as tissue-specific regulatory and/or inducible sequences. The design of the expression vector can depend on such factors as the choice of the host cell to be transformed, the level of expression of polypeptide desired, and the like. Expression vectors can be introduced into host cells to produce KLF12 polypeptides, including fusion polypeptides, encoded by KLF12 nucleic acids.

[0067] Recombinant expression vectors can be designed for expression of KLF12 polypeptides in prokaryotic or eukaryotic cells. For example, KLF12 polypeptides can be expressed in E. coli, insect cells (e.g., using baculovirus expression vectors), yeast cells, or mammalian cells. Suitable host cells are discussed further in Goeddel, Gene Expression Technology: Methods in Enzymology 185, Academic Press, San Diego, Calif. (1990). Alternatively, the recombinant expression vector can be transcribed and translated in vitro, for example using T7 promoter regulatory sequences and T7 polymerase.

[0068] Expression of polypeptides in prokaryotes is most often carried out in E. coli with vectors containing constitutive or inducible promoters directing the expression of either fusion or non-fusion polypeptides. Fusion vectors add a number of amino acids to a polypeptide encoded therein, usually to the amino terminus of the recombinant polypeptide. Such fusion vectors often serve three purposes: 1) to increase expression of recombinant polypeptide; 2) to increase the solubility of the recombinant polypeptide; and 3) to aid in the purification of the recombinant polypeptide by acting as a ligand in affinity purification. Often, a proteolytic cleavage site is introduced at the junction of the fusion moiety and the recombinant polypeptide to enable separation of the recombinant polypeptide from the fusion moiety subsequent to purification of the fusion polypeptide. Such enzymes, and their cognate recognition sequences, include Factor Xa, thrombin and enterokinase. Typical fusion expression vectors include pGEX (Pharmacia Biotech Inc; Smith & Johnson, Gene 67: 3140 (1988)), pMAL (New England Biolabs, Beverly, Mass.) and pRIT5 (Pharmacia, Piscataway, N.J.) which fuse glutathione S-transferase (GST), maltose E binding polypeptide, or polypeptide A, respectively, to the target recombinant polypeptide.

[0069] Purified fusion polypeptides can be used in screening assays and to generate antibodies specific for KLF12 polypeptides. In a therapeutic embodiment, fusion polypeptide expressed in a retroviral expression vector is used to infect bone marrow cells that are subsequently transplanted into irradiated recipients. The pathology of the subject recipient is then examined after sufficient time has passed (e.g., six (6) weeks).

[0070] Expressing the polypeptide in host bacteria with an impaired capacity to proteolytically cleave the recombinant polypeptide is often used to maximize recombinant polypeptide expression (Gottesman, S., Gene Expression Technology: Methods in Enzymology, Academic Press, San Diego, Calif. 185: 119-128 (1990)). Another strategy is to alter the nucleotide sequence of the nucleic acid to be inserted into an expression vector so that the individual codons for each amino acid are those preferentially utilized in E. coli (Wada et al., Nucleic Acids Res. 20: 2111-2118 (1992)). Such alteration of nucleotide sequences can be carried out by standard DNA synthesis techniques.

[0071] When used in mammalian cells, the expression vector's control functions are often provided by viral regulatory elements. For example, commonly used promoters are derived from polyoma, Adenovirus 2, cytomegalovirus and Simian Virus 40. Recombinant mammalian expression vectors are often capable of directing expression of the nucleic acid in a particular cell type (e.g., tissue-specific regulatory elements are used to express the nucleic acid). Non-limiting examples of suitable tissue-specific promoters include an albumin promoter (liver-specific; Pinkert et al., Genes Dev. 1: 268-277 (1987)), lymphoid-specific promoters (Calame & Eaton, Adv. Immunol 43: 235-275 (1988)), promoters of T cell receptors (Winoto & Baltimore, EMBO J 8: 729-733 (1989)) promoters of immunoglobulins (Banerji et al., Cell 33: 729-740 (1983); Queen & Baltimore, Cell 33: 741-748 (1983)), neuron-specific promoters (e.g., the neurofilament promoter; Byme & Ruddle, Proc. Natl. Acad. Sci. USA 86: 5473-5477 (1989)), pancreas-specific promoters (Edlund et al., Science 230: 912-916 (1985)), and mammary gland-specific promoters (e.g., milk whey promoter; U.S. Pat. No. 4,873,316 and European Application Publication No. 264,166). Developmentally-regulated promoters are sometimes utilized, for example, the murine hox promoters (Kessel & Gruss, Science 249: 374-379 (1990)) and the alpha-fetopolypeptide promoter (Campes & Tilghman, Genes Dev. 3: 537-546 (1989)).

[0072] A KLF12 nucleic acid may also be cloned into an expression vector in an antisense orientation. Regulatory sequences (e.g., viral promoters and/or enhancers) operatively linked to a KLF12 nucleic acid cloned in the antisense orientation can be chosen for directing constitutive, tissue specific or cell type specific expression of antisense RNA in a variety of cell types. Antisense expression vectors can be in the form of a recombinant plasmid, phagemid or attenuated virus. For a discussion of the regulation of gene expression using antisense genes see Weintraub et al., Antisense RNA as a molecular tool for genetic analysis, Reviews—Trends in Genetics, Vol. 1(1) (1986).

[0073] Also provided herein are host cells that include a KLF12 nucleic acid within a recombinant expression vector or KLF12 nucleic acid sequence fragments which allow it to homologously recombine into a specific site of the host cell genome. The terms “host cell” and “recombinant host cell” are used interchangeably herein. Such terms refer not only to the particular subject cell but rather also to the progeny or potential progeny of such a cell. Because certain modifications may occur in succeeding generations due to either mutation or environmental influences, such progeny may not, in fact, be identical to the parent cell, but are still included within the scope of the term as used herein. A host cell can be any prokaryotic or eukaryotic cell. For example, a KLF12 polypeptide can be expressed in bacterial cells such as E. coli, insect cells, yeast or mammalian cells (such as Chinese hamster ovary cells (CHO) or COS cells). Other suitable host cells are known to those skilled in the art.

[0074] Vectors can be introduced into host cells via conventional transformation or transfection techniques. As used herein, the terms “transformation” and “transfection” are intended to refer to a variety of art-recognized techniques for introducing foreign nucleic acid (e.g., DNA) into a host cell, including calcium phosphate or calcium chloride co-precipitation, transduction/infection, DEAE-dextran-mediated transfection, lipofection, or electroporation.

[0075] A host cell provided herein can be used to produce (i.e., express) a KLF12 polypeptide. Accordingly, further provided are methods for producing a KLF12 polypeptide using the host cells described herein. In one embodiment, the method includes culturing host cells into which a recombinant expression vector encoding a KLF12 polypeptide has been introduced in a suitable medium such that a KLF12 polypeptide is produced. In another embodiment, the method further includes isolating a KLF12 polypeptide from the medium or the host cell.

[0076] Also provided are cells or purified preparations of cells which include a KLF12 transgene, or which otherwise misexpress KLF12 polypeptide. Cell preparations can consist of human or non-human cells, e.g., rodent cells, e.g., mouse or rat cells, rabbit cells, or pig cells. In certain embodiments, the cell or cells include a KLF12 transgene (e.g., a heterologous form of a KLF12 such as a human gene expressed in non-human cells). The KLF]2 transgene can be misexpressed, e.g., overexpressed or underexpressed. In other embodiments, the cell or cells include a gene which misexpress an endogenous KLF12 polypeptide (e.g., expression of a gene is disrupted, also known as a knockout). Such cells can serve as a model for studying disorders which are related to mutated or mis-expressed KLF12 alleles or for use in drug screening. Also provided are human cells (e.g., a hematopoietic stem cells) transformed with a KLF12 nucleic acid.

[0077] Also provided are cells or a purified preparation thereof (e.g., human cells) in which an endogenous KLF12 nucleic acid is under the control of a regulatory sequence that does not normally control the expression of the endogenous KLF12 gene. The expression characteristics of an endogenous gene within a cell (e.g., a cell line or microorganism) can be modified by inserting a heterologous DNA regulatory element into the genome of the cell such that the inserted regulatory element is operably linked to the endogenous KLF12 gene. For example, an endogenous KLF12 gene (e.g., a gene which is “transcriptionally silent,” not normally expressed, or expressed only at very low levels) may be activated by inserting a regulatory element which is capable of promoting the expression of a normally expressed gene product in that cell. Techniques such as targeted homologous recombinations, can be used to insert the heterologous DNA as described in, e.g., Chappel, U.S. Pat. No. 5,272,071; WO 91/06667, published on May 16, 1991.

[0078] Transgenic Animals

[0079] Non-human transgenic animals that express a heterologous KLF12 polypeptide (e.g., expressed from a KLF12 nucleic acid isolated from another organism) can be generated. Such animals are useful for studying the function and/or activity of a KLF12 polypeptide and for identifying and/or evaluating modulators of KLF12 nucleic acid and KLF12 polypeptide activity. As used herein, a “transgenic animal” is a non-human animal such as a mammal (e.g., a non-human primate such as chimpanzee, baboon, or macaque; an ungulate such as an equine, bovine, or caprine; or a rodent such as a rat, a mouse, or an Israeli sand rat), a bird (e.g., a chicken or a turkey), an amphibian (e.g., a frog, salamander, or newt), or an insect (e.g., Drosophila melanogaster), in which one or more of the cells of the animal includes a KLF12 transgene. A transgene is exogenous DNA or a rearrangement (e.g., a deletion of endogenous chromosomal DNA) that is often integrated into or occurs in the genome of cells in a transgenic animal. A transgene can direct expression of an encoded gene product in one or more cell types or tissues of the transgenic animal, and other transgenes can reduce expression (e.g., a knockout). Thus, a transgenic animal can be one in which an endogenous KLF12 gene has been altered by homologous recombination between the endogenous gene and an exogenous DNA molecule introduced into a cell of the animal (e.g., an embryonic cell of the animal) prior to development of the animal.

[0080] Intronic sequences and polyadenylation signals can also be included in the transgene to increase expression efficiency of the transgene. One or more tissue-specific regulatory sequences can be operably linked to a KLF12 transgene to direct expression of a KLF12 polypeptide to particular cells. A. transgenic founder animal can be identified based upon the presence of a KLF12 transgene in its genome and/or expression of KLF12 mRNA in tissues or cells of the animals. A transgenic founder animal can then be used to breed additional animals carrying the transgene. Moreover, transgenic animals carrying a transgene encoding a KLF12 polypeptide can further be bred to other transgenic animals carrying other transgenes.

[0081] KLF12 polypeptides can be expressed in transgenic animals or plants by introducing, for example, a nucleic acid encoding the polypeptide into the genome of an animal. In certain embodiments the nucleic acid is placed under the control of a tissue specific promoter, e.g., a milk or egg specific promoter, and recovered from the milk or eggs produced by the animal. Also included is a population of cells from a transgenic animal.

[0082] KLF12 Polypeptides

[0083] Featured herein are isolated KLF12 polypeptides, which include polypeptides having amino acid sequences set forth in FIGS. 3A or 3B (SEQ ID NO: 4 or 5, respectively), and substantially identical polypeptides thereof. A KLF12 polypeptide is a polypeptide, protein or peptide encoded by a KLF12 nucleic acid, where one nucleic acid can encode one or more different polypeptides. An “isolated” or “purified” polypeptide or protein is substantially free of cellular material or other contaminating proteins from the cell or tissue source from which the protein is derived, or substantially free from chemical precursors or other chemicals when chemically synthesized. In one embodiment, the language “substantially free” means preparation of a KLF12 polypeptide or KLF12 polypeptide variant having less than about 30%, 20%, 10% and sometimes 5% (by dry weight), of non-KLF12 polypeptide (also referred to herein as a “contaminating protein”), or of chemical precursors or non-KLFI2 chemicals. When the KLF12 polypeptide or a biologically active portion thereof is recombinantly produced, it is also often substantially free of culture medium, specifically, where culture medium represents less than about 20%, sometimes less than about 10%, and often less than about 5% of the volume of the polypeptide. preparation. Isolated or purified KLF12 polypeptide preparations are sometimes 0.01 milligrams or more or 0.1 milligrams or more, and often 1.0 milligrams or more and 10 milligrams or more in dry weight.

[0084] In another aspect, featured herein are KLF12 polypeptides and biologically active or antigenic fragments thereof that are useful as reagents or targets in assays applicable to prevention, treatment or diagnosis of cancer. In another embodiment, provided herein are KLF12 polypeptides having a KLF12 activity or activities (e.g., AP-2a binding activity, WT1 mimicking activity, or gene silencing activity). In certain embodiments, the polypeptides are KLF12 proteins including at least one Gli-Kruppel C₂H₂-type zinc finger and sometimes having a KLF12 activity as described herein. Human KLF12 contains the following regions or other structural features: three CH2 type zinc finger domains at about amino acids 317-341, 347-371 and 377-399 of SEQ ID NO: 4.

[0085] In other embodiments, there are provided methods of decreasing the expression of KLF12, comprising providing or administering to individuals in need of decreasing the expression of KLF12 the pharmaceutical or physiologically acceptable composition comprising a KLF12 inhibitor (e.g., siRNA as described in Example 6).

[0086] Further included herein are KLF12 polypeptide fragments. The polypeptide fragment may be a domain or part of a domain of a KLF12 polypeptide. The polypeptide fragment is often 50 or fewer, 100 or fewer, or 200 or fewer amino acids in length, and is sometimes 300 or 400 or fewer amino acids in length. In certain embodiments, the polypeptide fragment comprises, consists essentially of, or consists of, at least 6 consecutive amino acids and not more than 402 consecutive amino acids of SEQ ID NO: 4, or the polypeptide fragment comprises, consists essentially of, or consists of, at least 6 consecutive amino acids and not more than 269 consecutive amino acids of SEQ ID NO: 5.

[0087] KLF12 polypeptides described herein can be used as immunogens to produce anti-KLF12 antibodies in a subject, to purify KLF12 ligands or binding partners, and in screening assays to identify molecules which inhibit or enhance the interaction of KLF12 with a KLF12 substrate. In an embodiment, KLF12 polypeptides described herein are used to screen for inhibitors of KLF12 expression. Full-length KLF12 polypeptides and polynucleotides encoding the same may be specifically substituted for a KLF12 polypeptide fragment or polynucleotide encoding the same in any embodiment described herein.

[0088] Substantially identical polypeptides may depart from the amino acid sequences set forth in FIGS. 3A or 3B in different manners. For example, conservative amino acid modifications may be introduced at one or more positions in the amino acid sequences of FIGS. 3A or 3B. A “conservative amino acid substitution” is one in which the amino acid is replaced by another amino acid having a similar structure and/or chemical function. Families of amino acid residues having similar structures and functions are well known. These families include amino acids with basic side chains (e.g., lysine, arginine, histidine), acidic side chains (e.g., aspartic acid, glutamic acid), uncharged polar side chains (e.g., glycine, asparagine, glutamine, serine, threonine, tyrosine, cysteine), nonpolar side chains (e.g., alanine, valine, leucine, isoleucine, proline, phenylalanine, methionine, tryptophan), beta-branched side chains (e.g., threonine, valine, isoleucine) and aromatic side chains (e.g., tyrosine, phenylalanine, tryptophan, histidine). Also, essential and non-essential amino acids may be replaced. A “non-essential” amino acid is one that can be altered without abolishing or substantially altering the biological function of a KLF12 polypeptide, whereas altering an “essential” amino acid abolishes or substantially alters the biological function of a KLF12 polypeptide. Amino acids that are conserved among KLF12 polypeptides are often essential amino acids.

[0089] Also, KLF12 polypeptides and polypeptide variants may exist as chimeric or fusion polypeptides. As used herein, a KLF12 “chimeric polypeptide” or “fusion polypeptide” includes a KLF12 polypeptide linked to a non-KLF12 polypeptide. A “non-KLF12 polypeptide” refers to a polypeptide having an amino acid sequence corresponding to a polypeptide which is not substantially identical to the KLF12 polypeptide, which includes, for example, a polypeptide that is different from the KLF12 polypeptide and derived from the same or a different organism. The KLF12 polypeptide in the fusion polypeptide can correspond to an entire or nearly entire KLF12 polypeptide or a fragment thereof. The non-KLF12 polypeptide can be fused to the N-terminus or C-terminus of the KLF12 polypeptide.

[0090] Fusion polypeptides can include a moiety having high affinity for a ligand. For example, the fusion polypeptide can be a GST-KLF12 fusion polypeptide in which the KLF12 sequences are fused to the C-terminus of the GST sequences, or a polyhistidine-KLF12 fusion polypeptide in which the KLF12 polypeptide is fused at the N- or C-terminus to a string of histidine residues. Such fusion polypeptides can facilitate purification of recombinant KLF12. Expression vectors are commercially available that already encode a fusion moiety (e.g., a GST polypeptide), and a KLF12 nucleic acid can be cloned into an expression vector such that the fusion moiety is linked in-frame to the KLF12 polypeptide. Further, the fusion polypeptide can be a KLF12 polypeptide containing a heterologous signal sequence at its N-terminus. In certain host cells (e.g., mammalian host cells), expression, secretion, cellular internalization, and cellular localization of a KLF12 polypeptide can be increased through use of a heterologous signal sequence. Fusion polypeptides can also include all or a part of a serum polypeptide (e.g., an IgG constant region or human serum albumin).

[0091] KLF12 polypeptides or fragments thereof can be incorporated into pharmaceutical compositions and administered to a subject in vivo. Administration of these KLF12 polypeptides can be used to affect the bioavailability of a KLF12 substrate and may effectively increase or decrease KLF12 biological activity in a cell or effectively supplement dysfunctional or hyperactive KLF12 polypeptide. KLF12 fusion polypeptides may be useful therapeutically for the treatment of disorders caused by, for example, (i) aberrant modification or mutation of a gene encoding a KLF12 polypeptide; (ii) mis-regulation of the KLF12 gene; and (iii) aberrant post-translational modification of a KLF12 polypeptide. Also, KLF12 polypeptides can be used as immunogens to produce anti-KLF12 antibodies in a subject, to purify KLF12 ligands or binding partners, and in screening assays to identify molecules which inhibit or enhance the interaction of KLF12 with a KLF12 substrate. The KLF12 polypeptides often are used in screening assays to identify molecules which inhibit the over-expression of KLF12.

[0092] In addition, polypeptides can be chemically synthesized using techniques known in the art (See, e.g., Creighton, 1983 Proteins. New York, N.Y.: W. H. Freeman and Company; and Hunkapiller et al., (1984) Nature July 12-18;310(5973):105-11). For example, a relative short polypeptide fragment can be synthesized by use of a peptide synthesizer. Furthermore, if desired, non-classical amino acids or chemical amino acid analogs can be introduced as a substitution or addition into the fragment sequence. Non-classical amino acids include, but are not limited to, to the D-isomers of the common amino acids, 2,4-diaminobutyric acid, a-amino isobutyric acid, 4-aminobutyric acid, Abu, 2-amino butyric acid, g-Abu, e-Ahx, 6-amino hexanoic acid, Aib, 2-amino isobutyric acid, 3-amino propionic acid, omithine, norleucine, norvaline, hydroxyproline, sarcosine, citrulline, homocitrulline, cysteic acid, t-butylglycine, t-butylalanine, phenylglycine, cyclohexylalanine, b-alanine, fluoroamino acids, designer amino acids such as b-methyl amino acids, Ca-methyl amino acids, Na-methyl amino acids, and amino acid analogs in general. Furthermore, the amino acid can be D (dextrorotary) or L (levorotary).

[0093] Also included are polypeptide fragments which are differentially modified during or after translation, e.g., by glycosylation, acetylation, phosphorylation, amidation, derivatization by known protecting/blocking groups, proteolytic cleavage, linkage to an antibody molecule or other cellular ligand, and the like. Any of numerous chemical modifications may be carried out by known techniques, including but not limited, to specific chemical cleavage by cyanogen bromide, trypsin, chymotrypsin, papain, V8 protease, NaBH₄; acetylation, formylation, oxidation, reduction; metabolic synthesis in the presence of tunicamycin; etc.

[0094] Additional post-translational modifications include, for example, N-linked or O-linked carbohydrate chains, processing of N-terminal or C-terminal ends), attachment of chemical moieties to the amino acid backbone, chemical modifications of N-linked or O-linked carbohydrate chains, and addition or deletion of an N-terminal methionine residue as a result of prokaryotic host cell expression. The polypeptide fragments may also be modified with a detectable label, such as an enzymatic, fluorescent, isotopic or affinity label to allow for detection and isolation of the polypeptide.

[0095] Also provided are chemically modified polypeptide derivatives that may provide additional advantages such as increased solubility, stability and circulating time of the polypeptide, or decreased immunogenicity. See U.S. Pat. No: 4,179,337. The chemical moieties for derivitization may be selected from water soluble polymers such as polyethylene glycol, ethylene glycol/propylene glycol copolymers, carboxymethylcellulose, dextran, polyvinyl alcohol and the like. The polypeptides may be modified at random positions within the molecule, or at predetermined positions within the molecule and may include one, two, three or more attached chemical moieties.

[0096] The polymer may be of any molecular weight, and may be branched or unbranched. For polyethylene glycol, the molecular weight is between about 1 kDa and about 100 kDa (the term “about” indicating that in preparations of polyethylene glycol, some molecules will weigh more, some less, than the stated molecular weight) for ease in handling and manufacturing. Other sizes may be used, depending on the desired therapeutic profile (e.g., the duration of sustained release desired, the effects, if any on biological activity, the ease in handling, the degree or lack of antigenicity and other known effects of the polyethylene glycol to a therapeutic protein or analog).

[0097] The polyethylene glycol molecules (or other chemical moieties) should be attached to the polypeptide with consideration of effects on functional or antigenic domains of the polypeptide. There are a number of attachment methods available to those skilled in the art, e.g., EP 0 401 384, herein incorporated by reference (coupling PEG to G-CSF), see also Malik et al. (1992) Exp Hematol. September;20(8):1028-35, reporting pegylation of GM-CSF using tresyl chloride). For example, polyethylene glycol may be covalently bound through amino acid residues via a reactive group, such as, a free amino or carboxyl group. Reactive groups are those to which an activated polyethylene glycol molecule may be bound. The amino acid residues having a free amino group may include lysine residues and the N-terminal amino acid residues; those having a free carboxyl group may include aspartic acid residues, glutamic acid residues and the C-terminal amino acid residue. Sulfhydryl groups may also be used as a reactive group for attaching the polyethylene glycol molecules. A polymer sometimes is attached at an amino group, such as attachment at the N-terminus or lysine group.

[0098] One may specifically desire proteins chemically modified at the N-terminus. Using polyethylene glycol as an illustration of the present composition, one may select from a variety of polyethylene glycol molecules (by molecular weight, branching, and the like), the proportion of polyethylene glycol molecules to protein (polypeptide) molecules in the reaction mix, the type of pegylation reaction to be performed, and the method of obtaining the selected N-terminally pegylated protein. The method of obtaining the N-terminally pegylated preparation (i.e., separating this moiety from other monopegylated moieties if necessary) may be by purification of the N-terminally pegylated material from a population of pegylated protein molecules. Selective proteins chemically modified at the N-terminus may be accomplished by reductive alkylation, which exploits differential reactivity of different types of primary amino groups (lysine versus the N-terminal) available for derivatization in a particular protein. Under the appropriate reaction conditions, substantially selective derivatization of the protein at the N-terminus with a carbonyl group containing polymer is achieved.

[0099] Substantially Identical KLF12 Nucleic Acids and Polypeptides

[0100] KLF12 nucleotide sequences and KLF12 polypeptide sequences that are substantially identical to the nucleotide sequences of FIGS. 1, 2A or 2B and the polypeptide sequences of FIGS. 3A or 3B, respectively, are included herein. The term “substantially identical” as used herein refers to two or more nucleic acids or polypeptides sharing one or more identical nucleotide sequences or polypeptide sequences, respectively. Included are nucleotide sequences or polypeptide sequences that are 55% or more, 60% or more, 65% or more, 70% or more, 75% or more, 80% or more, 85% or more, 90% or more, 95% or more (each often within a 1%, 2%, 3% or 4% variability) or more identical to the KLF12 nucleotide sequences in FIGS. 1A-1YYYY (SEQ ID NO: 1), FIG. 2A or 2B (SEQ ID NO: 2 or 3), or the KLF12 polypeptide sequences of FIG. 3A or 3B (SEQ ID NO: 4 or 5). One test for determining whether two nucleic acids are substantially identical is to determine the percent of identical nucleotide sequences or polypeptide sequences shared between the nucleic acids or polypeptides.

[0101] Calculations of sequence identity are often performed as follows. Sequences are aligned for optimal comparison purposes (e.g., gaps can be introduced in one or both of a first and a second amino acid or nucleic acid sequence for optimal alignment and non-homologous sequences can be disregarded for comparison purposes). The length of a reference sequence aligned for comparison purposes is sometimes 30% or more, 40% or more, 50% or more, often 60% or more, and more often 70% or more, 80% or more, 90% or more, or 100% of the length of the reference sequence. The nucleotides or amino acids at corresponding nucleotide or polypeptide positions, respectively, are then compared among the two sequences. When a position in the first sequence is occupied by the sane nucleotide or amino acid as the corresponding position in the second sequence, the nucleotides or amino acids are deemed to be identical at that position. The percent identity between the two sequences is a function of the number of identical positions shared by the sequences, taking into account the number of gaps, and the length of each gap, introduced for optimal alignment of the two sequences.

[0102] Comparison of sequences and determination of percent identity between two sequences can be accomplished using a mathematical algorithm. Percent identity between two amino acid or nucleotide sequences can be determined using the algorithm of Meyers & Miller, CABIOS 4: 11-17 (1989), which has been incorporated into the ALIGN program (version 2.0), using a PAM120 weight residue table, a gap length penalty of 12 and a gap penalty of 4. Also, percent identity between two amino acid sequences can be determined using the Needleman & Wunsch, J. Mol. Biol. 48: 444453 (1970) algorithm which has been incorporated into the GAP program in the GCG software package (available at the http address www.gcg.com), using either a Blossum 62 matrix or a PAM250 matrix, and a gap-weight of 16, 14, 12, 10, 8, 6, or 4 and a length weight of 1, 2, 3, 4, 5, or 6. Percent identity between two nucleotide sequences can be determined using the GAP program in the GCG software package (available at http address www.gcg.com), using a NWSgapdna.CMP matrix and a gap weight of 40, 50, 60, 70, or 80 and a length weight of 1, 2, 3, 4, 5, or 6. A set of parameters often used is a Blossum 62 scoring matrix with a gap open penalty of 12, a gap extend penalty of 4, and a frameshift gap penalty of 5.

[0103] Another manner for determining if two nucleic acids are substantially identical is to assess whether a polynucleotide homologous to one nucleic acid will hybridize to the other nucleic acid under stringent conditions. As use herein, the term “stringent conditions” refers to conditions for hybridization and washing. Stringent conditions are known to those skilled in the art and can be found in Current Protocols in Molecular Biology, John Wiley & Sons, N.Y., 6.3.1-6.3.6 (1 989). Aqueous and non-aqueous methods are described in that reference and either can be used. An example of stringent hybridization conditions is hybridization in 6× sodium chloride/sodium citrate (SSC) at about 45° C., followed by one or more washes in 0.2×SSC, 0.1% SDS at 50° C. Another example of stringent hybridization conditions are hybridization in 6× sodium chloride/sodium citrate (SSC) at about 45° C., followed by one or more washes in 0.2×SSC, 0.1% SDS at 55° C. A further example of stringent hybridization conditions is hybridization in 6× sodium chloride/sodium citrate (SSC) at about 45° C., followed by one or more washes in 0.2×SSC, 0.1% SDS at 60° C. Often, stringent hybridization conditions are hybridization in 6× sodium chloride/sodium citrate (SSC) at about 45° C., followed by one or more washes in 0.2×SSC, 0.1% SDS at 65° C. More often, stringency conditions are 0.5M sodium phosphate, 7% SDS at 65° C., followed by one or more washes at 0.2×SSC, 1% SDS at 65° C.

[0104] An example of a substantially identical nucleotide sequence to SEQ ID NO: 1 is one that has a different nucleotide sequence and still encodes a polypeptide sequence set forth in FIG. 3A or 3B. Another example is a nucleotide sequence that encodes a polypeptide having a polypeptide sequence that is 70% or more identical to, sometimes 75% or more, 80% or more, or 85% or more identical to, and often 90% or more and 95% or more identical to the polypeptide sequences set forth in FIGS. 3A or 3B.

[0105] KLF12 nucleotide sequences and polypeptide sequences can be used as “query sequences” to perform a search against public databases to identify other family members or related sequences, for example. Such searches can be performed using the NBLAST and XBLAST programs (version 2.0) of Altschul et al, J. Mol. Biol. 215: 403-10 (1990). BLAST nucleotide searches can be performed with the NBLAST program, score=100, wordlength=12 to obtain nucleotide sequences homologous to KLF12 nucleic acid molecules. BLAST polypeptide searches can be performed with the XBLAST program, score=50, wordlength=3 to obtain amino acid sequences homologous to KLF12 polypeptides. To obtain gapped alignments for comparison purposes, Gapped BLAST can be utilized as described in Altschul et al, Nucleic Acids Res. 25(17): 3389-3402 (1997). When utilizing BLAST and Gapped BLAST programs, default parameters of the respective programs (e.g., XBLAST and NBLAST) can be used (see the http address www.ncbi.nim.nih.gov).

[0106] A nucleic acid that is substantially identical to the nucleotide sequences of SEQ ID NO: 1, 2 or 3 may include polymorphic sites at positions equivalent to those described herein (e.g., position 96535 in SEQ ID NO: 1) when the sequences are aligned. For example, using the alignment procedures described herein, SNPs in a sequence substantially identical to the sequences of SEQ ID NO: 1, 2 or 3 can be identified at nucleotide positions that match (i.e., align) with nucleotides at SNP positions in SEQ ID NO: 1, 2 or 3. Also, where a polymorphic variation is an insertion or deletion, insertion or deletion of a nucleotide sequence from a reference sequence can change the relative positions of other polymorphic sites in the nucleotide sequence.

[0107] Substantially identical KLF12 nucleotide and polypeptide sequences include those that are naturally occurring, such as allelic variants (same locus), splice variants, homologs (different locus), and orthologs (different organism) or can be non-naturally occurring. Non-naturally occurring variants can be generated by mutagenesis techniques, including those applied to polynucleotides, cells, or organisms. The variants can contain nucleotide substitutions, deletions, inversions and insertions. Variation can occur in either or both the coding and non-coding regions. The variations can produce both conservative and non-conservative amino acid substitutions (as compared in the encoded product). Orthologs, homologs, allelic variants, and splice variants can be identified using methods known in the art. These variants normally comprise a nucleotide sequence encoding a polypeptide that is 50% or more, about 55% or more, often about 70-75% or more, more often about 80-85% or more, and often about 90-95% or more identical to the amino acid sequences shown in FIGS. 3A or 3B or a fragment thereof. Such nucleic acid molecules can readily be identified as being able to hybridize under stringent conditions to the nucleotide sequences shown in SEQ ID NO: 1, 2 or 3 or a fragment of the sequence. Nucleic acid molecules corresponding to orthologs, homologs, and allelic variants of the KLF12 nucleotide sequence can further be identified by mapping the sequence to the same chromosome or locus as the KLF12 nucleotide sequence or variant.

[0108] Also, substantially identical KLF12 nucleotide sequences may include codons that are altered with respect to the naturally occurring sequence for enhancing expression of a KLF12 polypeptide or polypeptide variant in a particular expression system. For example, the nucleic acid can be one in which one or more codons are altered, and often 10% or more or 20% or more of the codons are altered for optimized expression in bacteria (e.g., E. coli.), yeast (e.g., S. cervesiae), human (e.g., 293 cells), insect, or rodent (e.g., hamster) cells.

[0109] Methods for Identifying Risk of Cancer and Subjects at Risk of Cancer

[0110] Methods for identifying risk of cancer are provided, which includes determining the risk of having or developing cancer and/or identifying subjects at risk of cancer, and also are referred to as prognostic or diagnostic methods. These methods include detecting the presence or absence of one or more polymorphic variations in a nucleotide sequence set forth in FIG. 1 or FIG. 2, or a substantially identical nucleotide sequence thereof, in a sample from a subject, where the presence of a polymorphic variant described herein is indicative of a risk of cancer. Identifying a predisposition to cancer refers to determining whether an individual is at risk of developing cancer. In addition, detecting the presence or absence of one or more polymorphic variations in a nucleotide sequence of FIG. 1 or FIG. 2, or substantially identical sequence thereof, in a sample from a subject maybe diagnostic of the presence of cancer in the individual. In certain embodiments, the cancer is breast cancer, prostate cancer or melanoma.

[0111] Methods for identifying risk of cancer may be applied to any type of cancer such as breast cancer. As described hereafter, results from prognostic tests may be combined with other test results to diagnose breast cancer. For example, prognostic results may be gathered, a mammogram, clinical breast exam (CBE), or biopsy may be ordered based on a determined predisposition to breast cancer, and the mammogram, clinical breast exam or biopsy results may be utilized to diagnose breast cancer. Also breast cancer diagnostic methods can be developed from studies used to generate prognostic methods in which breast cancer populations are stratified into subpopulations having different progressions of the cancer.

[0112] Thus, featured herein is a method for detecting a subject at risk of breast cancer or the risk of breast cancer in a subject, which comprises detecting the presence or absence of a polymorphic variation associated with breast cancer at a polymorphic site in a nucleotide sequence set forth in SEQ ID NO: 1, 2 or 3 in a nucleic acid sample from a subject, where the nucleotide sequence comprises a polynucleotide sequence selected from the group consisting of: (a) a nucleotide sequence set forth in SEQ ID NO: 1, 2 or 3; (b) a nucleotide sequence which encodes a polypeptide having an amino acid sequence encoded by a nucleotide sequence in SEQ ID NO: 1, 2 or 3; (c) a nucleotide sequence which encodes a polypeptide that is 90% or more identical to an amino acid sequence encoded by a nucleotide sequence in SEQ ID NO: 1, 2 or 3 or a nucleotide sequence about 90% or more identical to the nucleotide sequence set forth in SEQ ID NO: 1, 2 or 3; and (d) a fragment of a nucleotide sequence of (a), (b), or (c), often a fragment that includes a polymorphic site associated with breast cancer; whereby the presence of the polymorphic variation is indicative of a risk of breast cancer in the subject. In certain embodiments, determining the presence of a combination of two or more polymorphic variants associated with breast cancer in one or more nucleotide sequences of the sample (e.g., at ICAM, MAPK10, NUMA1, KLF12 and/or GALE sequences) is determined to identify a subject at risk of breast cancer and/or risk of breast cancer.

[0113] A risk of developing aggressive forms of breast cancer likely to metastasize or invade surrounding tissues (e.g., Stage IIIA, IIIB, and IV breast cancers), and subjects at risk of developing aggressive forms of breast cancer also may be identified by the methods described herein. These methods include collecting phenotype information from subjects having breast cancer, which includes the stage of progression of the breast cancer, and performing a secondary phenotype analysis to detect the presence or absence of one or more polymorphic variations associated with a particular stage form of breast cancer. Thus, detecting the presence or absence of one or more polymorphic variations in a KLF12 nucleotide sequence associated with a late stage form of breast cancer often is diagnostic of an aggressive form of the cancer.

[0114] Results from prognostic tests may be combined with other test results to diagnose breast cancer. For example, prognostic results may be gathered, a patient sample may be ordered based on a determined predisposition to breast cancer, the patient sample is analyzed, and the results of the analysis may be utilized to diagnose breast cancer. Also breast cancer diagnostic methods can be developed from studies used to generate prognostic/diagnostic methods in which populations are stratified into subpopulations having different progressions of breast cancer. In another embodiment, prognostic results may be gathered; a patient's risk factors for developing breast cancer analyzed (e.g., age, race, family history, age of first menstrual cycle, age at birth of first child); and a patient sample may be ordered based on a determined predisposition to breast cancer. In an alternative embodiment, the results from predisposition analyses described herein may be combined with other test results indicative of breast cancer, which were previously, concurrently, or subsequently gathered with respect to the predisposition testing. In these embodiments, the combination of the prognostic test results with other test results can be probative of breast cancer, and the combination can be utilized as a breast cancer diagnostic. The results of any test indicative of breast cancer known in the art may be combined with the methods described herein. Examples of such tests are mammography (e.g., a more frequent and/or earlier mammography regimen may be prescribed); breast biopsy and optionally a biopsy from another tissue; breast ultrasound and optionally an ultrasound analysis of another tissue; breast magnetic resonance imaging (MRI) and optionally an MRI analysis of another tissue; electrical impedance (T-scan) analysis of breast and optionally of another tissue; ductal lavage; nuclear medicine analysis (e.g., scintimammography); BRCA1 and/or BRCA2 sequence analysis results; and thermal imaging of the breast and optionally of another tissue. Testing may be performed on tissue other than breast to diagnose the occurrence of metastasis (e.g., testing of the lymph node).

[0115] Risk of breast cancer sometimes is expressed as a probability, such as an odds ratio, percentage, or risk factor. The risk is based upon the presence or absence of one or more polymorphic variants described herein, and also may be based in part upon phenotypic traits of the individual being tested. Methods for calculating risk based upon patient data are well known (see, e.g., Agresti, Categorical Data Analysis, 2nd Ed. 2002. Wiley). Allelotyping and genotyping analyses may be carried out in populations other than those exemplified herein to enhance the predictive power of the prognostic method. These further analyses are executed in view of the exemplified procedures described herein, and may be based upon the same polymorphic variations or additional polymorphic variations. Risk determinations for breast cancer are useful in a variety of applications. In one embodiment, breast cancer risk determinations are used by clinicians to direct appropriate detection, preventative and treatment procedures to subjects who most require these. In another embodiment, breast cancer risk determinations are used by health insurers for preparing actuarial tables and for calculating insurance premiums.

[0116] The nucleic acid sample typically is isolated from a biological sample obtained from a subject. For example, nucleic acid can be isolated from blood, saliva, sputum, urine, cell scrapings, and biopsy tissue. The nucleic acid sample can be isolated from a biological sample using standard techniques, such as the technique described in Example 2. As used herein, the term “subject” refers primarily to humans but also refers to other mammals such as dogs, cats, and ungulates (e.g., cattle, sheep, and swine). Subjects also include avians (e.g., chickens and turkeys), reptiles, and fish (e.g., salmon), as embodiments described herein can be adapted to nucleic acid samples isolated from any of these organisms. The nucleic acid sample may be isolated from the subject and then directly utilized in a method for determining the presence of a polymorphic variant, or alternatively, the sample may be isolated and then stored (e.g., frozen) for a period of time before being subjected to analysis.

[0117] The presence or absence of a polymorphic variant is determined using one or both chromosomal complements represented in the nucleic acid sample. Determining the presence or absence of a polymorphic variant in both chromosomal complements represented in a nucleic acid sample from a subject having a copy of each chromosome is useful for determining the zygosity of an individual for the polymorphic variant (i.e., whether the individual is homozygous or heterozygous for the polymorphic variant). Any oligonucleotide-based diagnostic may be utilized to determine whether a sample includes the presence or absence of a polymorphic variant in a sample. For example, primer extension methods, ligase sequence determination methods (e.g., U.S. Pat. Nos. 5,679,524 and 5,952,174, and WO 01/27326), mismatch sequence determination methods (e.g., U.S. Pat. Nos. 5,851,770; 5,958,692; 6,110,684; and 6,183,958), microarray sequence determination methods, restriction fragment length polymorphism (RFLP), single strand conformation polymorphism detection (SSCP) (e.g., U.S. Pat. Nos. 5,891,625 and 6,013,499), PCR-based assays (eg., TAQMAN® PCR System (Applied Biosystems)), and nucleotide sequencing methods may be used.

[0118] Oligonucleotide extension methods typically involve providing a pair of oligonucleotide primers in a polymerase chain reaction (PCR) or in other nucleic acid amplification methods for the purpose of amplifying a region from the nucleic acid sample that comprises the polymorphic variation. One oligonucleotide primer is complementary to a region 3′ of the polymorphism and the other is complementary to a region 5′ of the polymorphism. A PCR primer pair may be used in methods disclosed in U.S. Pat. Nos. 4,683,195; 4,683,202,4,965,188; 5,656,493; 5,998,143; 6,140,054; WO 01/27327; and WO 01/27329 for example. PCR primer pairs may also be used in any commercially available machines that perform PCR, such as any of the GENEAMP® Systems available from Applied Biosystems. Also, those of ordinary skill in the art will be able to design oligonucleotide primers based upon a nucleotide sequence set forth in SEQ ID NO: 1, 2 or 3 without undue experimentation using knowledge readily available in the art.

[0119] Also provided is an extension oligonucleotide that hybridizes to the amplified fragment adjacent to the polymorphic variation. As used herein, the term “adjacent” refers to the 3′ end of the extension oligonucleotide being often 1 nucleotide from the 5′ end of the polymorphic site, and sometimes 2, 3, 4, 5, 6, 7, 8, 9, or 10 nucleotides from the 5′ end of the polymorphic site, in the nucleic acid when the extension oligonucleotide is hybridized to the nucleic acid. The extension oligonucleotide then is extended by one or more nucleotides, and the number and/or type of nucleotides that are added to the extension oligonucleotide determine whether the polymorphic variant is present. Oligonucleotide extension methods are disclosed, for example, in U.S. Pat. Nos. 4,656,127; 4,851,331; 5,679,524; 5,834,189; 5,876,934; 5,908,755; 5,912,118; 5,976,802; 5,981,186; 6,004,744; 6,013,431; 6,017,702; 6,046,005; 6,087,095; 6,210,891; and WO 01/20039. Oligonucleotide extension methods using mass spectrometry are described, for example, in U.S. Pat. Nos. 5,547,835; 5,605,798; 5,691,141; 5,849,542; 5,869,242; 5,928,906; 6,043,031; and 6,194,144, and a method often utilized is described herein in Example 2. Multiple extension oligonucleotides may be utilized in one reaction, which is referred to herein as “multiplexing.”

[0120] A microarray can be utilized for determining whether a polymorphic variant is present or absent in a nucleic acid sample. A microarray may include any oligonucleotides described herein, and methods for making and using oligonucleotide microarrays suitable for diagnostic use are disclosed in U.S. Pat. Nos. 5,492,806; 5,525,464; 5,589,330; 5,695,940; 5,849,483; 6,018,041; 6,045,996; 6,136,541; 6,142,681; 6,156,501; 6,197,506; 6,223,127; 6,225,625; 6,229,911; 6,239,273; WO 00/52625; WO 01/25485; and WO 01/29259. The microarray typically comprises a solid support and the oligonucleotides may be linked to this solid support by covalent bonds or by non-covalent interactions. The oligonucleotides may also be linked to the solid support directly or by a spacer molecule. A microarray may comprise one or more oligonucleotides complementary to a polymorphic site set forth in FIG. 1 or below.

[0121] A kit also may be utilized for determining whether a polymorphic variant is present or absent in a nucleic acid sample. A kit often comprises one or more pairs of oligonucleotide primers useful for amplifying a fragment of a KLF12 nucleotide sequence or a substantially identical sequence thereof, where the fragment includes a polymorphic site. The kit sometimes comprises a polymerizing agent, for example, a thermostable nucleic acid polymerase such as one disclosed in U.S. Pat. Nos. 4,889,818 or 6,077,664. Also, the kit often comprises an elongation oligonucleotide that hybridizes to a KLF12 nucleotide sequence in a nucleic acid sample adjacent to the polymorphic site. Where the kit includes an elongation oligonucleotide, it also often comprises chain elongating nucleotides, such as dATP, dTTP, dGTP, dCTP, and dITP, including analogs of dATP, dTTP, dGTP, dCTP and dTTP, provided that such analogs are substrates for a thermostable nucleic acid polymerase and can be incorporated into a nucleic acid chain elongated from the extension oligonucleotide. Along with chain elongating nucleotides would be one or more chain terminating nucleotides such as ddATP, ddTTP, ddGTP, ddCTP, and the like. In an embodiment, the kit comprises one or more oligonucleotide primer pairs, a polymerizing agent, chain elongating nucleotides, at least one elongation oligonucleotide, and one or more chain terminating nucleotides. Kits optionally include buffers, vials, microtiter plates, and instructions for use.

[0122] An individual identified as being at risk of breast cancer may be heterozygous or homozygous with respect to the allele associated with a higher risk of breast cancer. A subject homozygous for an allele associated with an increased risk of breast cancer is at a comparatively high risk of breast cancer, a subject heterozygous for an allele associated with an increased risk of breast cancer is at a comparatively intermediate risk of breast cancer, and a subject homozygous for an allele associated with a decreased risk of breast cancer is at a comparatively low risk of breast cancer. A genotype may be assessed for a complementary strand, such that the complementary nucleotide at a particular position is detected.

[0123] Also featured are methods for determining risk of breast cancer and/or identifying a subject at risk of breast cancer by contacting a polypeptide or protein encoded by a KLF12 nucleotide sequence from a subject with an antibody that specifically binds to an epitope associated with increased risk of breast cancer in the polypeptide.

[0124] Applications of Prognostic and Diagnostic Results to Pharmacogenomic Methods

[0125] Pharmacogenomics is a discipline that involves tailoring a treatment for a subject according to the subject's genotype. For example, based upon the outcome of a prognostic test described herein, a clinician or physician may target pertinent information and preventative or therapeutic treatments to a subject who would be benefited by the information or treatment and avoid directing such information and treatments to a subject who would not be benefited (e.g., the treatment has no therapeutic effect and/or the subject experiences adverse side effects). As therapeutic approaches for breast cancer continue to evolve and improve, the goal of treatments for breast cancer related disorders is to intervene even before clinical signs (e.g., identification of lump in the breast) first manifest. Thus, genetic markers associated with susceptibility to breast cancer prove useful for early diagnosis, prevention and treatment of breast cancer.

[0126] The following is an example of a pharmacogenomic embodiment. A particular treatment regimen can exert a differential effect depending upon the subject's genotype. Where a candidate therapeutic exhibits a significant interaction with a major allele and a comparatively weak interaction with a minor allele (e.g., an order of magnitude or greater difference in the interaction), such a therapeutic typically would not be administered to a subject genotyped as being homoygous for the minor allele, and sometimes not administered to a subject genotyped as being heteroygous for the minor allele. In another example, where a candidate therapeutic is not significantly toxic when administered to subjects who are homoygous for a major allele but is comparatively toxic when administered to subjects heterozygous or homozygous for a minor allele, the candidate therapeutic is not typically administered to subjects who are genotyped as being heterozygous or homozygous with respect to the minor allele.

[0127] The methods described herein are applicable to pharmacogenomic methods for detecting, preventing, alleviating and/or treating breast cancer. For example, a nucleic acid sample from an individual may be subjected to a genetic test described herein. Where one or more polymorphic variations associated with increased risk of breast cancer are identified in a subject, information for detecting, preventing or treating breast cancer and/or one or more breast cancer detection, prevention and/or treatment regimens then may be directed to and/or prescribed to that subject.

[0128] In certain embodiments, a detection, prevenative and/or treatment regimen is specifically prescribed and/or administered to individuals who will most benefit from it based upon their risk of developing breast cancer assessed by the methods described herein. Thus, provided are methods for identifying a subject at risk of breast cancer and then prescribing a detection, therapeutic or preventative regimen to individuals identified as being at risk of breast cancer. Thus, certain embodiments are directed to methods for treating breast cancer in a subject, reducing risk of breast cancer in a subject, or early detection of breast cancer in a subject, which comprise: detecting the presence or absence of a polymorphic variant associated with breast cancer in a nucleotide sequence set forth in SEQ ID NO: 1, 2 or 3 in a nucleic acid sample from a subject, where the nucleotide sequence comprises a polynucleotide sequence selected from the group consisting of: (a) a nucleotide sequence set forth in SEQ ID NO: 1, 2 or 3; (b) a nucleotide sequence which encodes a polypeptide having an amino acid sequence encoded by a nucleotide sequence in SEQ ID NO: 1, 2 or 3; (c) a nucleotide sequence which encodes a polypeptide that is 90% or more identical to an amino acid sequence encoded by a nucleotide sequence in SEQ ID NO: 1, 2 or 3 or a nucleotide sequence about 90% or more identical to the nucleotide sequence set forth in SEQ ID NO: 1, 2 or 3; and (d) a fragment of a nucleotide sequence of (a), (b), or (c), sometimes comprising a polymorphic site associated with breast cancer; and prescribing or administering a breast cancer treatment regimen, preventative regimen and/or detection regimen to a subject from whom the sample originated where the presence of one or more polymorphic variations associated with breast cancer are detected in the nucleotide sequence. In these methods, genetic results may be utilized in combination with other test results to diagnose breast cancer as described above. Other test results include but are not limited to mammography results, imaging results, biopsy results and results from BRCA1 or BRAC2 test results, as described above.

[0129] Detection regimens include one or more mammography procedures, a regular mammography regimen (e.g., once a year, or once every six, four, three or two months); an early mammography regimen (e.g., mammography tests are performed beginning at age 25, 30, or 35); one or more biopsy procedures (e.g., a regular biopsy regimen beginning at age 40); breast biopsy and biopsy from other tissue; breast ultrasound and optionally ultrasound analysis of another tissue; breast magnetic resonance imaging (MRI) and optionally MRI analysis of another tissue; electrical impedance (T-scan) analysis of breast and optionally another tissue; ductal lavage; nuclear medicine analysis (e.g., scintimammography); BRCA1 and/or BRCA2 sequence analysis results; and/or thermal imaging of the breast and optionally another tissue.

[0130] Treatments sometimes are preventative (e.g., is prescribed or administered to reduce the probability that a breast cancer associated condition arises or progresses), sometimes are therapeutic, and sometimes delay, alleviate or halt the progression of breast cancer. Any known preventative or therapeutic treatment for alleviating or preventing the occurrence of breast cancer is prescribed and/or administered. For example, certain preventative treatments often are prescribed to subjects having a predisposition to breast cancer and where the subject is not diagnosed with breast cancer or is diagnosed as having symptoms indicative of early stage breast cancer (e.g., stage I). For subjects not diagnosed as having breast cancer, any preventative treatments known in the art can be prescribed and administered, which include selective hormone receptor modulators (e.g., selective estrogen receptor modulators (SERMs) such as tamoxifen, reloxifene, and toremifene); compositions that prevent production of hormones (e.g., aramotase inhibitors that prevent the production of estrogen in the adrenal gland, such as exemestane, letrozole, anastrozol, groserelin, and megestrol); other hormonal treatments (e.g., goserelin acetate and fulvestrant); biologic response modifiers such as antibodies (e.g., trastuzumab (herceptin/HER2)); surgery (e.g., lumpectomy and mastectomy); drugs that delay or halt metastasis (e.g., pamidronate disodium); and alternative/complementary medicine (e.g., acupuncture, acupressure, moxibustion, qi gong, reiki, ayurveda, vitamins, minerals, and herbs (e.g., astragalus root, burdock root, garlic, green tea, and licorice root)).

[0131] The use of breast cancer treatments are well known in the art, and include surgery, chemotherapy and/or radiation therapy. Any of the treatments may be used in combination to treat or prevent breast cancer (e.g., surgery followed by radiation therapy or chemotherapy). Examples of chemotherapy combinations used to treat breast cancer include: cyclophosphamide (Cytoxan), methotrexate (Amethopterin, Mexate, Folex), and fluorouracil (Fluorouracil, 5-Fu, Adrucil), which is referred to as CMF; cyclophosphamide, doxorubicin (Adriamycin), and fluorouracil, which is referred to as CAF; and doxorubicin (Adriamycin) and cyclophosphamide, which is referred to as AC.

[0132] As breast cancer preventative and treatment information can be specifically targeted to subjects in need thereof (e.g., those at risk of developing breast cancer or those that have early signs of breast cancer), provided herein is a method for preventing or reducing the risk of developing breast cancer in a subject, which comprises: (a) detecting the presence or absence of a polymorphic variation associated with breast cancer at a polymorphic site in a nucleotide sequence in a nucleic acid sample from a subject; (b) identifying a subject at risk of breast cancer, whereby the presence of the polymorphic variation is indicative of a risk of breast cancer in the subject; and (c) if such a risk is identified, providing the subject with information about methods or products to prevent or reduce breast cancer or to delay the onset of breast cancer. Also provided is a method of targeting information or advertising to a subpopulation of a human population based on the subpopulation being genetically predisposed to a disease or condition, which comprises: (a) detecting the presence or absence of a polymorphic variation associated with breast cancer at a polymorphic site in a nucleotide sequence in a nucleic acid sample from a subject; (b) identifying the subpopulation of subjects in which the polymorphic variation is associated with breast cancer; and (c) providing information only to the subpopulation of subjects about a particular product which may be obtained and consumed or applied by the subject to help prevent or delay onset of the disease or condition.

[0133] Pharmacogenomics methods also may be used to analyze and predict a response to a breast cancer treatment or a drug. For example, if pharmacogenomics analysis indicates a likelihood that an individual will respond positively to a breast cancer treatment with a particular drug, the drug may be administered to the individual. Conversely, if the analysis indicates that an individual is likely to respond negatively to treatment with a particular drug, an alternative course of treatment may be prescribed. A negative response may be defined as either the absence of an efficacious response or the presence of toxic side effects. The response to a therapeutic treatment can be predicted in a background study in which subjects in any of the following populations are genotyped: a population that responds favorably to a treatment regimen, a population that does not respond significantly to a treatment regimen, and a population that responds adversely to a treatment regiment (e.g., exhibits one or more side effects). These populations are provided as examples and other populations and subpopulations may be analyzed. Based upon the results of these analyses, a subject is genotyped to predict whether he or she will respond favorably to a treatment regimen, not respond significantly to a treatment regimen, or respond adversely to a treatment regimen.

[0134] The methods described herein also are applicable to clinical drug trials. One or more polymorphic variants indicative of response to an agent for treating breast cancer or to side effects to an agent for treating breast cancer may be identified using the methods described herein. Thereafter, potential participants in clinical trials of such an agent may be screened to identify those individuals most likely to respond favorably to the drug and exclude those likely to experience side effects. In that way, the effectiveness of drug treatment may be measured in individuals who respond positively to the drug, without lowering the measurement as a result of the inclusion of individuals who are unlikely to respond positively in the study and without risking undesirable safety problems. In certain embodiments, the agent for treating breast cancer described herein targets KLF12 or a target in the KLF12 pathway (e.g., Rho GTPase).

[0135] Thus, another embodiment is a method of selecting an individual for inclusion in a clinical trial of a treatment or drug comprising the steps of: (a) obtaining a nucleic acid sample from an individual; (b) determining the identity of a polymorphic variation which is associated with a positive response to the treatment or the drug, or at least one polymorphic variation which is associated with a negative response to the treatment or the drug in the nucleic acid sample, and (c) including the individual in the clinical trial if the nucleic acid sample contains said polymorphic variation associated with a positive response to the treatment or the drug or if the nucleic acid sample lacks said polymorphic variation associated with a negative response to the treatment or the drug. In addition, the methods for selecting an individual for inclusion in a clinical trial of a treatment or drug encompass methods with any further limitation described in this disclosure, or those following, specified alone or in any combination. The polymorphic variation may be in a sequence selected individually or in any combination from the group consisting of (i) a polynucleotide sequence set forth in SEQ ID NO: 1, 2 or 3; (ii) a polynucleotide sequence that is 90% or more identical to a nucleotide sequence set forth in SEQ ID NO: I, 2 or 3; (iii) a polynucleotide sequence that encodes a polypeptide having an amino acid sequence identical to or 90% or more identical to an amino acid sequence encoded by a nucleotide sequence set forth in SEQ ID NO: 1, 2 or 3; and (iv) a fragment of a polynucleotide sequence of (i), (ii), or (iii) comprising the polymorphic site. The including step (c) optionally comprises administering the drug or the treatment to the individual if the nucleic acid sample contains the polymorphic variation associated with a positive response to the treatment or the drug and the nucleic acid sample lacks said biallelic marker associated with a negative response to the treatment or the drug.

[0136] Also provided herein is a method of partnering between a diagnostic/prognostic testing provider and a provider of a consumable product, which comprises: (a) the diagnostic/prognostic testing provider detects the presence or absence of a polymorphic variation associated with breast cancer at a polymorphic site in a nucleotide sequence in a nucleic acid sample from a subject; (b) the diagnostic/prognostic testing provider identifies the subpopulation of subjects in which the polymorphic variation is associated with breast cancer; (c) the diagnostic/prognostic testing provider forwards information to the subpopulation of subjects about a particular product which may be obtained and consumed or applied by the subject to help prevent or delay onset of the disease or condition; and (d) the provider of a consumable product forwards to the diagnostic test provider a fee every time the diagnostic/prognostic test provider forwards information to the subject as set forth in step (c) above.

[0137] Compositions Comprising Breast Cancer-Directed Molecules

[0138] Featured herein is a composition comprising a breast cancer cell and one or more molecules specifically directed and targeted to a nucleic acid comprising a KLF12 nucleotide sequence or a KLF12 polypeptide. Such directed molecules include, but are not limited to, a compound that binds to a KLF12 nucleic acid or a KLF12 polypeptide; a RNAi or siRNA molecule having a strand complementary to a KLF12 nucleotide sequence; an antisense nucleic acid complementary to an RNA encoded by a KLF12 DNA sequence; a ribozyme that hybridizes to a KLF12 nucleotide sequence; a nucleic acid aptamer that specifically binds a KLF12 polypeptide; and an antibody that specifically binds to a KLF12 polypeptide or binds to a KLF12 nucleic acid. In specific embodiments, the breast cancer directed molecule interacts with a KLF12 nucleic acid or polypeptide variant associated with breast cancer. In other embodiments, the breast cancer directed molecule interacts with a polypeptide involved in the KLF12 signal pathway, or a nucleic acid encoding such a polypeptide.

[0139] Compositions sometimes include an adjuvant known to stimulate an immune response, and in certain embodiments, an adjuvant that stimulates a T-cell lymphocyte response. Adjuvants are known, including but not limited to an aluminum adjuvant (e.g., aluminum hydroxide); a cytokine adjuvant or adjuvant that stimulates a cytokine response (e.g., interleukin (IL)-12 and/or γ-interferon cytokines); a Freund-type mineral oil adjuvant emulsion (e.g., Freund's complete or incomplete adjuvant); a synthetic lipoid compound; a copolymer adjuvant (e.g., TitreMax); a saponin; Quil A; a liposome; an oil-in-water emulsion (e.g., an emulsion stabilized by Tween 80 and pluronic polyoxyethlene/polyoxypropylene block copolymer (Syntex Adjuvant Formulation); TitreMax; detoxified endotoxin (MPL) and mycobacterial cell wall components (TDW, CWS) in 2% squalene (Ribi Adjuvant System)); a muramyl dipeptide; an immune-stimulating complex (ISCOM, e.g., an Ag-modified saponin/cholesterol micelle that forms stable cage-like structure); an aqueous phase adjuvant that does not have a depot effect (e.g., Gerbu adjuvant); a carbohydrate polymer (e.g., AdjuPrime); L-tyrosine; a manide-oleate compound (e.g., Montanide); an ethylene-vinyl acetate copolymer (e.g., Elvax 40W1,2); or lipid A, for example. Such compositions are useful for generating an immune response against a breast cancer directed molecule (e.g., an HLA-binding subsequence within a polypeptide encoded by a nucleotide sequence in SEQ ID NO: 1). In such methods, a peptide having an amino acid subsequence of a polypeptide encoded by a nucleotide sequence in SEQ ID NO: 1, 2 or 3 is delivered to a subject, where the subsequence binds to an HLA molecule and induces a CTL lymphocyte response. The peptide sometimes is delivered to the subject as an isolated peptide or as a minigene in a plasmid that encodes the peptide. Methods for identifying HLA-binding subsequences in such polypeptides are known (see e.g., publication WO02/20616 and PCT application US98/01373 for methods of identifying such sequences).

[0140] The breast cancer cell may be in a group of breast cancer cells and/or other types of cells cultured in vitro or in a tissue having breast cancer cells (e.g., a melanocytic lesion) maintained in vitro or present in an animal in vivo (e.g., a rat, mouse, ape or human). In certain embodiments, a composition comprises a component from a breast cancer cell or from a subject having a breast cancer cell instead of the breast cancer cell or in addition to the breast cancer cell, where the component sometimes is a nucleic acid molecule (e.g., genomic DNA), a protein mixture or isolated protein, for example. The aforementioned compositions have utility in diagnostic, prognostic and pharmacogenomic methods described previously and in breast cancer therapeutics described hereafter. Certain breast cancer molecules are described in greater detail below.

[0141] Compounds

[0142] Compounds can be obtained using any of the numerous approaches in combinatorial library methods known in the art, including: biological libraries; peptoid libraries (libraries of molecules having the functionalities of peptides, but with a novel, non-peptide backbone which are resistant to enzymatic degradation but which nevertheless remain bioactive (see, e.g., Zuckermann et al, J. Med. Chem.37: 2678-85 (1994)); spatially addressable parallel solid phase or solution phase libraries; synthetic library methods requiring deconvolution; “one-bead one-compound” library methods; and synthetic library methods using affinity chromatography selection. Biological library and peptoid library approaches are typically limited to peptide libraries, while the other approaches are applicable to peptide, non-peptide oligomer or small molecule libraries of compounds (Lam, Anticancer Drug Des. 12: 145, (1997)). Examples of methods for synthesizing molecular libraries are described, for example, in DeWitt et al., Proc. Natl. Acad. Sci. U.S.A. 90: 6909 (1993); Erb et al., Proc. Natl. Acad. Sci. USA 91: 11422 (1994); Zuckermann et al., J. Med. Chem. 37: 2678 (1994); Cho et al., Science 261: 1303 (1993); Carrell et al., Angew. Chem. Int. Ed. Engl. 33: 2059 (1994); Carell et al., Angew. Chem. Int. Ed. Engl. 33: 2061 (1994); and in Gallop et al., J. Med. Chem. 37: 1233 (1994).

[0143] Libraries of compounds may be presented in solution (e.g., Houghten, Biotechniques 13: 412421 (1992)), or on beads (Lam, Nature 354: 82-84 (1991)), chips (Fodor, Nature 364: 555-556 (1993)), bacteria or spores (Ladner, U.S. Pat. No. 5,223,409), plasmids (Cull et al., Proc. Natl. Acad. Sci. USA 89: 1865-1869 (1992)) or on phage (Scott and Smith, Science 249: 386-390 (1990); Devlin, Science 249: 404-406 (1990); Cwirla et al., Proc. Natl. Acad. Sci. 87: 6378-6382 (1990); Felici, J. Mol. Biol. 222: 301-310 (1991); Ladner supra.).

[0144] A compound sometimes alters expression and sometimes alters activity of a KLF12 polypeptide and may be a small molecule. Small molecules include, but are not limited to, peptides, peptidomimetics (e.g., peptoids), amino acids, amino acid analogs, polynucleotides, polynucleotide analogs, nucleotides, nucleotide analogs, organic or inorganic compounds (i.e., including heteroorganic and organometallic compounds) having a molecular weight less than about 10,000 grams per mole, organic or inorganic compounds having a molecular weight less than about 5,000 grams per mole, organic or inorganic compounds having a molecular weight less than about 1,000 grams per mole, organic or inorganic compounds having a molecular weight less than about 500 grams per mole, and salts, esters, and other pharmaceutically acceptable forms of such compounds.

[0145] Antisense Nucleic Acid Molecules, Ribozymes, RNAi, siRNA and Modified Nucleic Acid Molecules

[0146] An “antisense” nucleic acid refers to a nucleotide sequence complementary to a “sense” nucleic acid encoding a polypeptide, e.g., complementary to the coding strand of a double-stranded cDNA molecule or complementary to an mRNA sequence. The antisense nucleic acid can be complementary to an entire coding strand in SEQ ID NO: 1, 2 or 3, or to a portion thereof or a substantially identical sequence thereof. In another embodiment, the antisense nucleic acid molecule is antisense to a “noncoding region” of the coding strand of a nucleotide sequence in SEQ ID NO: 1 (e.g., 5′ and 3′ untranslated regions).

[0147] An antisense nucleic acid can be designed such that it is complementary to the entire coding region of an mRNA encoded by a nucleotide sequence in SEQ ID NO: 1 (e.g., SEQ ID NO: 2), and often the antisense nucleic acid is an oligonucleotide antisense to only a portion of a coding or noncoding region of the mRNA. For example, the antisense oligonucleotide can be complementary to the region surrounding the translation start site of the mRNA, e.g., between the −10 and +10 regions of the target gene nucleotide sequence of interest. An antisense oligonucleotide can be, for example, about 7, 10, 15, 20, 25, 30, 35,40, 45, 50, 55, 60, 65, 70, 75, 80, or more nucleotides in length. The antisense nucleic acids, which include the ribozymes described hereafter, can be designed to target a nucleotide sequence in SEQ ID NO: 1, 2 or 3, often a variant associated with breast cancer, or a substantially identical sequence thereof. Among the variants, minor alleles and major alleles can be targeted, and those associated with a higher risk of breast cancer are often designed, tested, and administered to subjects.

[0148] An antisense nucleic acid can be constructed using chemical synthesis and enzymatic ligation reactions using standard procedures. For example, an antisense nucleic acid (e.g., an antisense oligonucleotide) can be chemically synthesized using naturally occurring nucleotides or variously modified nucleotides designed to increase the biological stability of the molecules or to increase the physical stability of the duplex formed between the antisense and sense nucleic acids, e.g., phosphorothioate derivatives and acridine substituted nucleotides can be used. Antisense nucleic acid also can be produced biologically using an expression vector into which a nucleic acid has been subcloned in an antisense orientation (i.e., RNA transcribed from the inserted nucleic acid will be of an antisense orientation to a target nucleic acid of interest, described further in the following subsection).

[0149] When utilized as therapeutics, antisense nucleic acids typically are administered to a subject (e.g., by direct injection at a tissue site) or generated in situ such that they hybridize with or bind to cellular mRNA and/or genomic DNA encoding a polypeptide and thereby inhibit expression of the polypeptide, for example, by inhibiting transcription and/or translation. Alternatively, antisense nucleic acid molecules can be modified to target selected cells and then are administered systemically. For systemic administration, antisense molecules can be modified such that they specifically bind to receptors or antigens expressed on a selected cell surface, for example, by linking antisense nucleic acid molecules to peptides or antibodies which bind to cell surface receptors or antigens. Antisense nucleic acid molecules can also be delivered to cells using the vectors described herein. Sufficient intracellular concentrations of antisense molecules are achieved by incorporating a strong promoter, such as a pol II or pol III promoter, in the vector construct.

[0150] Antisense nucleic acid molecules sometimes are *-anomeric nucleic acid molecules. An *-anomeric nucleic acid molecule forms specific double-stranded hybrids with complementary RNA in which, contrary to the usual *-units, the strands run parallel to each other (Gaultier et al., Nucleic Acids. Res. 15: 6625-6641 (1987)). Antisense nucleic acid molecules can also comprise a 2′-o-methylribonucleotide (Inoue et al., Nucleic Acids Res. 15: 6131-6148 (1987)) or a chimeric RNA-DNA analogue (Inoue et al., FEBS Lett. 215: 327-330 (1987)). Antisense nucleic acids sometimes are composed of DNA or PNA or any other nucleic acid derivatives described previously.

[0151] In another embodiment, an antisense nucleic acid is a ribozyme. A ribozyme having specificity for a KLF12 nucleotide sequence can include one or more sequences complementary to such a nucleotide sequence, and a sequence having a known catalytic region responsible for mRNA cleavage (see e.g., U.S. Pat. No. 5,093,246 or Haselhoff and Gerlach, Nature 334: 585-591 (1988)). For example, a derivative of a Tetrahymena L-19 IVS RNA is sometimes utilized in which the nucleotide sequence of the active site is complementary to the nucleotide sequence to be cleaved in a mRNA (see e.g., Cech et al. U.S. Pat. No.4,987,071; and Cech et al. U.S. Pat. No.5,116,742). Also, target mRNA sequences can be used to select a catalytic RNA having a specific ribonuclease activity from a pool of RNA molecules (see e.g., Bartel & Szostak, Science 261: 1411-1418 (1993)).

[0152] Breast cancer directed molecules include in certain embodiments nucleic acids that can form triple helix structures with a KLF12 nucleotide sequence or a substantially identical sequence thereof, especially one that includes a regulatory region that controls expression of a polypeptide. Gene expression can be inhibited by targeting nucleotide sequences complementary to the regulatory region of a KLF12 nucleotide sequence or a substantially identical sequence (e.g., promoter and/or enhancers) to form triple helical structures that prevent transcription of a gene in target cells (see e.g., Helene, Anticancer Drug Des. 6(6): 569-84 (1991); Helene et al., Ann. N.Y. Acad. Sci. 660: 27-36 (1992); and Maher, Bioassays 14(12): 807-15 (1992). Potential sequences that can be targeted for triple helix formation can be increased by creating a so-called “switchback” nucleic acid molecule. Switchback molecules are synthesized in an alternating 5′-3′, 3′-5′ manner, such that they base pair with first one strand of a duplex and then the other, eliminating the necessity for a sizeable stretch of either purines or pyrimidines to be present on one strand of a duplex.

[0153] Breast cancer directed molecules include RNAi and siRNA nucleic acids. Gene expression may be inhibited by the introduction of double-stranded RNA (dsRNA), which induces potent and specific gene silencing, a phenomenon called RNA interference or RNAi. See, e.g., Fire et al., U.S. Pat. No. 6,506,559; Tuschl et al. PCT International Publication No. WO 01/75164; Kay et al. PCT International Publication No. WO 03/010180A1; or Bosher J M, Labouesse, Nat Cell Biol 2000 February;2(2):E31-6. This process has been improved by decreasing the size of the double-stranded RNA to 20-24 base pairs (to create small-interfering RNAs or siRNAs) that “switched off” genes in mammalian cells without initiating an acute phase response, i.e., a host defense mechanism that often results in cell death (see, e.g., Caplen et al. Proc Natl Acad Sci U S A. 2001 August 14;98(17):9742-7 and Elbashir et al. Methods 2002 February;26(2):199-213). There is increasing evidence of post-transcriptional gene silencing by RNA interference (RNAi) for inhibiting targeted expression in mammalian cells at the mRNA level, in human cells. There is additional evidence of effective methods for inhibiting the proliferation and migration of tumor cells in human patients, and for inhibiting metastatic cancer development (see, e.g., U.S. patent application No. US2001000993183; Caplen et al Proc Natl Acad Sci U S A; and Abderrahmani et al. Mol Cell Biol 2001 Nov. 21(21):7256-67).

[0154] An “siRNA” or “RNAi” refers to a nucleic acid that forms a double stranded RNA and has the ability to reduce or inhibit expression of a gene or target gene when the siRNA is delivered to or expressed in the same cell as the gene or target gene. “siRNA” refers to short double-stranded RNA formed by the complementary strands. Complementary portions of the siRNA that hybridize to form the double stranded molecule often have substantial or complete identity to the target molecule sequence. In one embodiment, an siRNA refers to a nucleic acid that has substantial or complete identity to a target gene and forms a double stranded siRNA.

[0155] When designing the siRNA molecules, the targeted region often is selected from a given DNA sequence beginning 50 to 100 nucleotides downstream of the start codon. See, e.g., Elbashir et al,. Methods 26:199-213 (2002). Initially, 5′ or 3′ UTRs and regions nearby the start codon were avoided assuming that UTR-binding proteins and/or translation initiation complexes may interfere with binding of the siRNP or RISC endonuclease complex. Sometimes regions of the target 23 nucleotides in length conforming to the sequence motif AA(N19)TT (N, an nucleotide), and regions with approximately 30% to 70% G/C-content (often about 50% G/C-content) often are selected. If no suitable sequences are found, the search often is extended using the motif NA(N21). The sequence of the sense siRNA sometimes corresponds to (N19) TT or N21 (position 3 to 23 of the 23-nt motif), respectively. In the latter case, the 3′ end of the sense siRNA often is converted to TT. The rationale for this sequence conversion is to generate a symmetric duplex with respect to the sequence composition of the sense and antisense 3′ overhangs. The antisense siRNA is synthesized as the complement to position 1 to 21 of the 23-nt motif. Because position 1 of the 23-nt motif is not recognized sequence-specifically by the antisense siRNA, the 3′-most nucleotide residue of the antisense siRNA can be chosen deliberately. However, the penultimate nucleotide of the antisense siRNA (complementary to position 2 of the 23-nt motif) often is complementary to the targeted sequence. For simplifying chemical synthesis, TT often is utilized. siRNAs corresponding to the target motif NAR(N17)YNN, where R is purine (A,G) and Y is pyrimidine (C,U), often are selected. Respective 21 nucleotide sense and antisense siRNAs often begin with a purine nucleotide and can also be expressed from pol III expression vectors without a change in targeting site. Expression of RNAs from pol III promoters often is efficient when the first transcribed nucleotide is a purine.

[0156] The sequence of the siRNA can correspond to the full length target gene, or a subsequence thereof. Often, the siRNA is about 15 to about 50 nucleotides in length (e.g., each complementary sequence of the double stranded siRNA is 15-50 nucleotides in length, and the double stranded siRNA is about 15-50 base pairs in length, sometimes about 20-30 nucleotides in length or about 20-25 nucleotides in length, e.g.. 20, 21, 22, 23, 24, 25, 26, 27, 28, 29, or 30 nucleotides in length. The siRNA sometimes is about 21 nucleotides in length. Methods of using siRNA are well known in the art, and specific siRNA molecules may be purchased from a number of companies including Dharmacon Research, Inc.

[0157] Antisense, ribozyme, RNAi and siRNA nucleic acids can be altered to form modified nucleic acid molecules. The nucleic acids can be altered at base moieties, sugar moieties or phosphate backbone moieties to improve stability, hybridization, or solubility of the molecule. For example, the deoxyribose phosphate backbone of nucleic acid molecules can be modified to generate peptide nucleic acids (see Hyrup et al, Bioorganic & Medicinal Chemistry 4 (1): 5-23 (1996)). As used herein, the terms “peptide nucleic acid” or “PNA” refers to a nucleic acid mimic such as a DNA mimic, in which the deoxyribose phosphate backbone is replaced by a pseudopeptide backbone and only the four natural nucleobases are retained. The neutral backbone of a PNA can allow for specific hybridization to DNA and RNA under conditions of low ionic strength. Synthesis of PNA oligomers can be performed using standard solid phase peptide synthesis protocols as described, for example, in Hyrup et al., (1996) supra and Perry-O'Keefe et al., Proc. Natl. Acad. Sci. 93: 14670-675 (1996).

[0158] PNA nucleic acids can be used in prognostic, diagnostic, and therapeutic applications. For example, PNAs can be used as antisense or antigene agents for sequence-specific modulation of gene expression by, for example, inducing transcription or translation arrest or inhibiting replication. PNA nucleic acid molecules can also be used in the analysis of single base pair mutations in a gene, (e.g., by PNA-directed PCR clamping); as “artificial restriction enzymes” when used in combination with other enzymes, (e.g., S1 nucleases (Hyrup (1996) supra)); or as probes or primers for DNA sequencing or hybridization (Hyrup et al., (1996) supra; Perry-O'Keefe supra).

[0159] In other embodiments, oligonucleotides may include other appended groups such as peptides (e.g., for targeting host cell receptors in vivo), or agents facilitating transport across cell membranes (see e.g., Letsinger et al., Proc. Natl. Acad. Sci. USA 86: 6553-6556 (1989); Lemaitre et al., Proc. Natl. Acad. Sci. USA 84: 648-652 (1987); PCT Publication No. WO88/09810) or the blood-brain barrier (see, e.g.; PCT Publication No. WO89/10134). In addition, oligonucleotides can be modified with hybridization-triggered cleavage agents (See, e.g., Krol et al., Bio-Techniques 6: 958-976 (1988)) or intercalating agents. (See, e.g., Zon, Pharm. Res. 5: 539-549 (1988) ). To this end, the oligonucleotide may be conjugated to another molecule, (e.g., a peptide, hybridization triggered cross-linking agent, transport agent, or hybridization-triggered cleavage agent).

[0160] Also included herein are molecular beacon oligonucleotide primer and probe molecules having one or more regions complementary to a nucleotide sequence of SEQ ID NO: 1, 2 or 3 or a substantially identical sequence thereof, two complementary regions one having a fluorophore and one a quencher such that the molecular beacon is useful for quantifying the presence of the nucleic acid in a sample. Molecular beacon nucleic acids are described, for example, in Lizardi et al., U.S. Pat. No. 5,854,033; Nazarenko et al., U.S. Pat. No. 5,866,336, and Livak et al., U.S. Pat. 5,876,930.

[0161] Antibodies

[0162] The term “antibody” as used herein refers to an immunoglobulin molecule or immunologically active portion thereof, i.e., an antigen-binding portion. Examples of immunologically active portions of immunoglobulin molecules include F(ab) and F(ab′)2 fragments which can be generated by treating the antibody with an enzyme such as pepsin. An antibody sometimes is a polyclonal, monoclonal, recombinant (e.g., a chimeric or humanized), fully human, non-human (e.g., murine), or a single chain antibody. An antibody may have effector function and can fix complement, and is sometimes coupled to a toxin or imaging agent.

[0163] A full-length polypeptide or antigenic peptide fragment encoded by a KLF12 nucleotide sequence can be used as an immunogen or can be used to identify antibodies made with other immunogens, e.g., cells, membrane preparations, and the like. An antigenic peptide often includes at least 8 amino acid residues of the amino acid sequences encoded by a nucleotide sequence of SEQ ID NO: 1, 2 or 3, or substantially identical sequence thereof, and encompasses an epitope. Antigenic peptides sometimes include 10 or more amino acids, 15 or more amino acids, 20 or more amino acids, or 30 or more amino acids. Hydrophilic and hydrophobic fragments of polypeptides sometimes are used as immunogens.

[0164] Epitopes encompassed by the antigenic peptide are regions located on the surface of the polypeptide (e.g., hydrophilic regions) as well as regions with high antigenicity. For example, an Emini surface probability analysis of the human polypeptide sequence can be used to indicate the regions that have a particularly high probability of being localized to the surface of the polypeptide and are thus likely to constitute surface residues useful for targeting antibody production. The antibody may bind an epitope on any domain or region on polypeptides described herein.

[0165] Also, chimeric, humanized, and completely human antibodies are useful for applications which include repeated administration to subjects. Chimeric and humanized monoclonal antibodies, comprising both human and non-human portions, can be made using standard recombinant DNA techniques. Such chimeric and humanized monoclonal antibodies can be produced by recombinant DNA techniques known in the art, for example using methods described in Robinson et al International Application No. PCT/US86/02269; Akira, et al European Patent Application 184,187; Taniguchi, M., European Patent Application 171,496; Morrison et al European Patent Application 173,494; Neuberger et al PCT International Publication No. WO 86/01533; Cabilly et al U.S. Patent No. 4,816,567; Cabilly et al European Patent Application 125,023; Better et al., Science 240: 1041-1043 (1988); Liu et al., Proc. Natl. Acad. Sci. USA 84: 3439-3443 (1987); Liu et al., J. Immunol. 139: 3521-3526 (1987); Sun el al., Proc. Natl. Acad. Sci. USA 84: 214-218 (1987); Nishimura et al., Canc. Res. 47: 999-1005 (1987); Wood et al.; Nature 314: 446449 (1985); and Shaw et al., J. Natl. Cancer Inst. 80: 1553-1559 (1988); Morrison, S. L., Science 229: 1202-1207 (1985); Oi et al., BioTechniques 4: 214 (1986); Winter U.S. Pat. No. 5,225,539; Jones et al., Nature 321: 552-525 (1986); Verhoeyan et al., Science 239: 1534; and Beidler et al., J. Immunol. 141: 40534060 (1988).

[0166] Completely human antibodies are particularly desirable for therapeutic treatment of human patients. Such antibodies can be produced using transgenic mice that are incapable of expressing endogenous immunoglobulin heavy and light chains genes, but which can express human heavy and light chain genes. See, for example, Lonberg and Huszar, Int. Rev. Immunol. 13: 65-93 (1995); and U.S. Pat. Nos. 5,625,126; 5,633,425; 5,569,825; 5,661,016; and 5,545,806. In addition, companies such as Abgenix, Inc. (Fremont, Calif.) and Medarex, Inc. (Princeton, N.J.), can be engaged to provide human antibodies directed against a selected antigen using technology similar to that described above. Completely human antibodies that recognize a selected epitope also can be generated using a technique referred to as “guided selection.” In this approach a selected non-human monoclonal antibody (e.g., a murine antibody) is used to guide the selection of a completely human antibody recognizing the same epitope. This technology is described for example by Jespers et al., Bio/Technology 12: 899-903 (1994).

[0167] An antibody can be a single chain antibody. A single chain antibody (scFV) can be engineered (see, e.g., Colcher et al., Ann. N Y Acad. Sci. 880: 263-80 (1999); and Reiter, Clin. Cancer Res. 2: 245-52 (1996)). Single chain antibodies can be dimerized or multimerized to generate multivalent antibodies having specificities for different epitopes of the same target polypeptide.

[0168] Antibodies also may be selected or modified so that they exhibit reduced or no ability to bind an Fc receptor. For example, an antibody may be an isotype or subtype, fragment or other mutant, which does not support binding to an Fc receptor (e.g., it has a mutagenized or deleted Fc receptor binding region).

[0169] Also, an antibody (or fragment thereof) may be conjugated to a therapeutic moiety such as a cytotoxin, a therapeutic agent or a radioactive metal ion. A cytotoxin or cytotoxic agent includes any agent that is detrimental to cells. Examples include taxol, cytochalasin B, gramicidin D, ethidium bromide, emetine, mitomycin, etoposide, tenoposide, vincristine, vinblastine, colchicin, doxorubicin, daunorubicin, dihydroxy anthracin dione, mitoxantrone, mithramycin, actinomycin D, 1 dehydrotestosterone, glucocorticoids, procaine, tetracaine, lidocaine, propranolol, and puromycin and analogs or homologs thereof. Therapeutic agents include, but are not limited to, antimetabolites (e.g., methotrexate, 6-mercaptopurine, 6-thioguanine, cytarabine, 5-fluorouracil decarbazine), alkylating agents (e.g., mechlorethamine, thiotepa chlorambucil, melphalan, carmustine (BCNU) and lomustine (CCNU), cyclophospliamide, busulfan, dibromomannitol, streptozotocin, mitomycin C, and cis-dichliorodiamine platinum (II) (DDP) cisplatin), anthracyclines (e.g., daunorubicin (formerly daunomycin) and doxorubicin), antibiotics (e.g., dactinomycin (formerly actinomycin), bleomycin, mithramycin, and anthramycin (AMC)), and anti-mitotic agents (e.g., vincristine and vinblastine).

[0170] Antibody conjugates can be used for modifying a given biological response. For example, the drug moiety may be a protein or polypeptide possessing a desired biological activity. Such proteins may include, for example, a toxin such as abrin, ricin A, pseudomonas exotoxin, or diphtheria toxin; a polypeptide such as tumor necrosis factor, γ-interferon, α-interferon, nerve growth factor, platelet derived growth factor, tissue plasminogen activator; or, biological response modifiers such as, for example, lymphokines, interleukin-1 (“IL-1”), interleukin-2 (“IL-2”), interleukin-6 (“IL-6”), granulocyte macrophage colony stimulating factor (“GM-CSF”), granulocyte colony stimulating factor (“G-CSF”), or other growth factors. Also, an antibody can be conjugated to a second antibody to form an antibody heteroconjugate as described by Segal in U.S. Pat. No. 4,676,980, for example.

[0171] An antibody (e.g., monoclonal antibody) can be used to isolate target polypeptides by standard techniques, such as affinity chromatography or immunoprecipitation. Moreover, an antibody can be used to detect a target polypeptide (e.g., in a cellular lysate or cell supernatant) in order to evaluate the abundance and pattern of expression of the polypeptide. Antibodies can be used diagnostically to monitor polypeptide levels in tissue as part of a clinical testing procedure, e.g., to determine the efficacy of a given treatment regimen. Detection can be facilitated by coupling (i.e., physically linking) the antibody to a detectable substance (i.e., antibody labeling). Examples of detectable substances include various enzymes, prosthetic groups, fluorescent materials, luminescent materials, bioluminescent materials, and radioactive materials. Examples of suitable enzymes include horseradish peroxidase, alkaline phosphatase, β-galactosidase, or acetylcholinesterase; examples of suitable prosthetic group complexes include streptavidin/biotin and avidin/biotin; examples of suitable fluorescent materials include umbelliferone, fluorescein, fluorescein isothiocyanate, rhodamine, dichlorotriazinylamine fluorescein, dansyl chloride or phycoerythrin; an example of a luminescent material includes luminol; examples of bioluminescent materials include luciferase, luciferin, and aequorin, and examples of suitable radioactive material include ¹²⁵I, ¹³¹I, ³⁵S or ³H. Also, an antibody can be utilized as a test molecule for determining whether it can treat breast cancer, and as a therapeutic for administration to a subject for treating breast cancer.

[0172] An antibody can be made by immunizing with a purified antigen, or a fragment thereof, e.g., a fragment described herein, a membrane associated antigen, tissues, e.g., crude tissue preparations, whole cells, preferably living cells, lysed cells, or cell fractions.

[0173] Included herein are antibodies which bind only a native polypeptide, only denatured or otherwise non-native polypeptide, or which bind both, as well as those having linear or conformational epitopes. Conformational epitopes sometimes can be identified by-selecting antibodies that bind to native but not denatured polypeptide. Also featured are antibodies that specifically bind to a polypeptide variant associated with breast cancer.

Screening Assays

[0174] Featured herein are methods for identifying a candidate therapeutic for treating breast cancer. The methods comprise contacting a test molecule with a target molecule in a system. A “target molecule” as used herein refers to a nucleic acid of SEQ ID NO: 1, 2 or 3, a substantially identical nucleic acid thereof, or a fragment thereof, and an encoded polypeptide of the foregoing. The method also comprises determining the presence or absence of an interaction between the test molecule and the target molecule, where the presence of an interaction between the test molecule and the nucleic acid or polypeptide identifies the test molecule as a candidate breast cancer therapeutic. The interaction between the test molecule and the target molecule may be quantified.

[0175] Test molecules and candidate therapeutics include, but are not limited to, compounds, antisense nucleic acids, siRNA molecules, ribozymes, polypeptides or proteins encoded by a KLF12 nucleic acids, or a substantially identical sequence or fragment thereof, and immunotherapeutics (e.g., antibodies and HLA-presented polypeptide fragments). A test molecule or candidate therapeutic may act as a modulator of target molecule concentration or target molecule function in a system. A “modulator” may agonize (i.e., up-regulates) or antagonize (i.e., down-regulates) a target molecule concentration partially or completely in a system by affecting such cellular functions as DNA replication and/or DNA processing (e.g., DNA methylation or DNA repair), RNA transcription and/or RNA processing (e.g., removal of intronic sequences and/or translocation of spliced mRNA from the nucleus), polypeptide production (e.g., translation of the polypeptide from mRNA), and/or polypeptide post-translational modification (e.g., glycosylation, phosphorylation, and proteolysis of pro-polypeptides). A modulator may also agonize or antagonize a biological function of a target molecule partially or completely, where the function may include adopting a certain structural conformation, interacting with one or more binding partners, ligand binding, catalysis (e.g., phosphorylation, dephosphorylation, hydrolysis, methylation, and isomerization), and an effect upon a cellular event (e.g., effecting progression of breast cancer).

[0176] As used herein, the term “system” refers to a cell free in vitro environment and a cell-based environment such as a collection of cells, a tissue, an organ, or an organism. A system is “contacted” with a test molecule in a variety of manners, including adding molecules in solution and allowing them to interact with one another by diffusion, cell injection, and any administration routes in an animal. As used herein, the term “interaction” refers to an effect of a test molecule on test molecule, where the effect sometimes is binding between the test molecule and the target molecule, and sometimes is an observable change in cells, tissue, or organism.

[0177] There are many standard methods for detecting the presence or absence of interaction between a test molecule and a KLF12 nucleic acid or polypeptide. For example, titrametric, acidimetric, radiometric, NMR, monolayer, polarographic, spectrophotometric, fluorescent, and ESR assays probative of KLF12 function may be utilized.

[0178] An interaction can be determined by labeling the test molecule and/or the KLF12 molecule, where the label is covalently or non-covalently attached to the test molecule or KLF12 molecule. The label is sometimes a radioactive molecule such as ¹²⁵I, ¹³¹I, ³⁵S or ³H, which can be detected by direct counting of radioemission or by scintillation counting. Also, enzymatic labels such as horseradish peroxidase, alkaline phosphatase, or luciferase may be utilized where the enzymatic label can be detected by determining conversion of an appropriate substrate to product. Also, presence or absence of an interaction can be determined without labeling. For example, a microphysiometer (e.g., Cytosensor) is an analytical instrument that measures the rate at which a cell acidifies its environment using a light-addressable potentiometric sensor (LAPS). Changes in this acidification rate can be used as an indication of an interaction between a test molecule and KLF12 (McConnell, H. M. et al., Science 257: 1906-1912 (1992)).

[0179] In cell-based systems, cells often include a KLF12 nucleic acid or polypeptide or variants thereof and are often of mammalian origin, although the cell can be of any origin. Whole cells, cell homogenates, and cell fractions (e.g., cell membrane fractions) can be subjected to analysis. Where interactions between a test molecule with a KLF12 polypeptide or variant thereof are monitored, soluble and/or membrane bound forms of the polypeptide or variant may be utilized. Where membrane-bound forms of the polypeptide are used, it may be desirable to utilize a solubilizing agent. Examples of such solubilizing agents include non-ionic detergents such as n-octylglucoside, n-dodecylglucoside, n-dodecylmaltoside, octanoyl-N-methylglucamide, decanoyl-N-methylglucamide, Triton® X-100, Triton® X-114, Thesit®, Isotridecypoly(ethylene glycol ether)ₙ, 3-[(3-cholamidopropyl)dimethylamminio]-1-propane sulfonate (CHAPS), 3-[(3-cholamidopropyl)dimethylamminio]-2-hydroxy-1-propane sulfonate (CHAPSO), or N-dodecyl-N,N-dimethyl-3-ammonio-1-propane sulfonate.

[0180] An interaction between two molecules can also be detected by monitoring fluorescence energy transfer (FET) (see, for example, Lakowicz et al., U.S. Pat. No. 5,631,169; Stavrianopoulos et al. U.S. Pat. No. 4,868,103). A fluorophore label on a first, “donor” molecule is selected such that its emitted fluorescent energy is absorbed by a fluorescent label on a second, “acceptor” molecule, which in turn is able to fluoresce due to the absorbed energy. Alternately, the “donor” polypeptide molecule may simply utilize the natural fluorescent energy of tryptophan residues. Labels are chosen that emit different wavelengths of light, such that the “acceptor” molecule label may be differentiated from that of the “donor”. Since the efficiency of energy transfer between the labels is related to the distance separating the molecules, the spatial relationship between the molecules can be assessed. In a situation in which binding occurs between the molecules, the fluorescent emission of the “acceptor” molecule label in the assay should be maximal. An FET binding event can be conveniently measured through standard fluorometric detection means well known in the art (e.g., using a fluorimeter).

[0181] In another embodiment, determining the presence or absence of an interaction between a test molecule and a KLF12 molecule can be effected by using real-time Biomolecular Interaction Analysis (BIA) (see, e.g., Sjolander & Urbaniczk, Anal. Chem. 63: 2338-2345 (1991) and Szabo et al., Curr. Opin. Struct. Biol. 5: 699-705 (1995)). “Surface plasmon resonance” or “BIA” detects biospecific interactions in real time, without labeling any of the interactants (e.g., BIAcore). Changes in the mass at the binding surface (indicative of a binding event) result in alterations of the refractive index of light near the surface (the optical phenomenon of surface plasmon resonance (SPR)), resulting in a detectable signal which can be used as an indication of real-time reactions between biological molecules.

[0182] In another embodiment, the KLF12 molecule or test molecules are anchored to a solid phase. The KLF12 molecule/test molecule complexes anchored to the solid phase can be detected at the end of the reaction. The target KLF12 molecule is often anchored to a solid surface, and the test molecule, which is not anchored, can be labeled, either directly or indirectly, with detectable labels discussed herein.

[0183] It may be desirable to immobilize a KLF12 molecule, an anti-KLF12 antibody, or test molecules to facilitate separation of complexed from uncomplexed forms of KLF12 molecules and test molecules, as well as to accommodate automation of the assay. Binding of a test molecule to a KLF12 molecule can be accomplished in any vessel suitable for containing the reactants. Examples of such vessels include microtiter plates, test tubes, and micro-centrifuge tubes. In one embodiment, a fusion polypeptide can be provided which adds a domain that allows a KLF12 molecule to be bound to a matrix. For example, glutathione-S-transferase/KLF12 fusion polypeptides or glutathione-S-transferase/target fusion polypeptides can be adsorbed onto glutathione sepharose beads (Sigma Chemical, St. Louis, Mo.) or glutathione derivatized microtiter plates, which are then combined with the test compound or the test compound and either the non-adsorbed target polypeptide or KLF12 polypeptide, and the mixture incubated under conditions conducive to complex formation (e.g., at physiological conditions for salt and pH). Following incubation, the beads or microtiter plate wells are washed to remove any unbound components, the matrix immobilized in the case of beads, complex determined either directly or indirectly, for example, as described above. Alternatively, the complexes can be dissociated from the matrix, and the level of KLF12 binding or activity determined using standard techniques.

[0184] Other techniques for immobilizing a KLF12 molecule on matrices include using biotin and streptavidin. For example, biotinylated KLF12 polypeptide or target molecules can be prepared from biotin-NHS (N-hydroxy-succinimide) using techniques known in the art (e.g., biotinylation kit, Pierce Chemicals, Rockford, Ill.), and immobilized in the wells of streptavidin-coated 96 well plates (Pierce Chemical).

[0185] In order to conduct the assay, the non-immobilized component is added to the coated surface containing the anchored component. After the reaction is complete, unreacted components are removed (e.g., by washing) under conditions such that any complexes formed will remain immobilized on the solid surface. The detection of complexes anchored on the solid surface can be accomplished in a number of ways. Where the previously non-immobilized component is pre-labeled, the detection of label immobilized on the surface indicates that complexes were formed. Where the previously non-immobilized component is not pre-labeled, an indirect label can be used to detect complexes anchored on the surface; e.g., using a labeled antibody specific for the immobilized component (the antibody, in turn, can be directly labeled or indirectly labeled with, e.g., a labeled anti-Ig antibody).

[0186] In one embodiment, this assay is performed utilizing antibodies reactive with KLF12 polypeptide or test molecules but which do not interfere with binding of the KLF12 polypeptide to its test molecule. Such antibodies can be derivatized to the wells of the plate, and unbound target or KLF12 polypeptide trapped in the wells by antibody conjugation. Methods for detecting such complexes, in addition to those described above for the GST-immobilized complexes, include immunodetection of complexes using antibodies reactive with the KLF12 polypeptide or target molecule, as well as enzyme-linked assays which rely on detecting an enzymatic activity associated with the KLF12 polypeptide or test molecule.

[0187] Alternatively, cell free assays can be conducted in a liquid phase. In such an assay, the reaction products are separated from unreacted components, by any of a number of standard techniques, including but not limited to: differential centrifugation (see, for example, Rivas, G., and Minton, A. P., Trends Biochem Sci August; 18(8): 284-7 (1993)); chromatography (gel filtration chromatography, ion-exchange chromatography); electrophoresis (see, e.g., Ausubel et al., eds. Current Protocols in Molecular Biology, J. Wiley: New York (1 999)); and immunoprecipitation (see, for example, Ausubel, F. et al., eds. Current Protocols in Molecular Biology, J. Wiley: New York (1999)). Such resins and chromatographic techniques are known to one skilled in the art (see, e.g., Heegaard, J. Mol. Recognit. Winter; 11(1-6): 141-8 (1998); Hage & Tweed, J. Chromatogr. B Biomed. Sci. Appl. October 10; 699 (1-2): 499-525 (1997)). Further, fluorescence energy transfer may also be conveniently utilized, as described herein, to detect binding without further purification of the complex from solution.

[0188] In another embodiment, modulators of KLF12 expression are identified. For example, a cell or cell free mixture is contacted with a candidate compound and the expression of KLF12 mRNA or polypeptide evaluated relative to the level of expression of KLF12 mRNA or polypeptide in the absence of the candidate compound. When expression of KLF12 mRNA or polypeptide is greater in the presence of the candidate compound than in its absence, the candidate compound is identified as a stimulator of KLF12 mRNA or polypeptide expression. Alternatively, when expression of KLF12 mRNA or polypeptide is less (statistically significantly less) in the presence of the candidate compound than in its absence, the candidate compound is identified as an inhibitor of KLF12 mRNA or polypeptide expression. The level of KLF12 mRNA or polypeptide expression can be determined by methods described herein for detecting KLF12 mRNA or polypeptide. A similar assay is further described in Example 4.

[0189] In another embodiment, binding partners that interact with a KLF12 molecule are detected. The KLF12 molecules can interact with one or more cellular or extracellular macromolecules, such as polypeptides, in vivo, and these molecules that interact with KLF12 molecules are referred to herein as “binding partners.” Molecules that disrupt such interactions can be useful in regulating the activity of the target gene product. For example, in the case of KLF12, molecules that block the ability of KLF12 to inhibit the expression of secondary regulatory genes that play a role in oncogenesis, such as AP-2, can be detected and subsequently used as anti-cancer agents. Such molecules can include, but are not limited to molecules such as antibodies, peptides, siRNA and small molecules. Target genes/products for use in this embodiment often are the KLF12 genes herein identified. In an alternative embodiment, provided is a method for determining the ability of the test compound to modulate the activity of a KLF12 polypeptide through modulation of the activity of a downstreain-effector of a KLF12 target molecule. For example, the activity of the effector molecule on an appropriate target can be determined, or the binding of the effector to an appropriate target can be determined, as previously described.

[0190] To identify compounds that interfere with the interaction between the target gene product and its cellular or extracellular binding partner(s), e.g., a substrate, a reaction mixture containing the target gene product and the binding partner is prepared, under conditions and for a time sufficient, to allow the two products to form complex. In order to test an inhibitory agent, the reaction mixture is provided in the presence and absence of the test compound. The test compound can be initially included in the reaction mixture, or can be added at a time subsequent to the addition of the target gene and its cellular or extracellular binding partner. Control reaction mixtures are incubated without the test compound or with a placebo. The formation of any complexes between the target gene product and the cellular or extracellular binding partner is then detected. The formation of a complex in the control reaction, but not in the reaction mixture containing the test compound, indicates that the compound interferes with the interaction of the target gene product and the interactive binding partner. Additionally, complex formation within reaction mixtures containing the test compound and normal target gene product can also be compared to complex formation within reaction mixtures containing the test compound and mutant target gene product. This comparison can be important in those cases where it is desirable to identify compounds that disrupt interactions of mutant but not normal target gene products.

[0191] These assays can be conducted in a heterogeneous or homogeneous format. Heterogeneous assays involve anchoring either the target gene product or the binding partner onto a solid phase, and detecting complexes anchored on the solid phase at the end of the reaction. In homogeneous assays, the entire reaction is carried out in a liquid phase. In either approach, the order of addition of reactants can be varied to obtain different information about the compounds being tested. For example, test compounds that interfere with the interaction between the target gene products and the binding partners, e.g., by competition, can be identified by conducting the reaction in the presence of the test substance. Alternatively, test compounds that disrupt preformed complexes, e.g., compounds with higher binding constants that displace one of the components from the complex, can be tested by adding the test compound to the reaction mixture after complexes have been formed. The various formats are briefly described below.

[0192] In a heterogeneous assay system, either the target gene product or the interactive cellular or extracellular binding partner, is anchored onto a solid surface (e.g., a microtiter plate), while the non-anchored species is labeled, either directly or indirectly. The anchored species can be immobilized by non-covalent or covalent attachments. Alternatively, an immobilized antibody specific for the species to be anchored can be used to anchor the species to the solid surface.

[0193] In order to conduct the assay, the partner of the immobilized species is exposed to the coated surface with or without the test compound. After the reaction is complete, unreacted components are removed (e.g., by washing) and any complexes formed will remain immobilized on the solid surface. Where the non-immobilized species is pre-labeled, the detection of label immobilized on the surface indicates that complexes were formed. Where the non-immobilized species is not pre-labeled, an indirect label can be used to detect complexes anchored on the surface; e.g., using a labeled antibody specific for the initially non-immobilized species (the antibody, in turn, can be directly labeled or indirectly labeled with, e.g., a labeled anti-Ig antibody). Depending upon the order of addition of reaction components, test compounds that inhibit complex formation or that disrupt preformed complexes can be detected.

[0194] Alternatively, the reaction can be conducted in a liquid phase in the presence or absence of the test compound, the reaction products separated from unreacted components, and complexes detected; e.g., using an immobilized antibody specific for one of the binding components to anchor any complexes formed in solution, and a labeled antibody specific for the other partner to detect anchored complexes. Again, depending upon the order of addition of reactants to the liquid phase, test compounds that inhibit complex or that disrupt preformed complexes can be identified.

[0195] In an alternate embodiment, a homogeneous assay can be used. For example, a preformed complex of the target gene product and the interactive cellular or extracellular binding partner product is prepared in that either the target gene products or their binding partners are labeled, but the signal generated by the label is quenched due to complex formation (see, e.g., U.S. Pat. No.4,109,496 that utilizes this approach for immunoassays). The addition of a test substance that competes with and displaces one of the species from the preformed complex will result in the generation of a signal above background. In this way, test substances that disrupt target gene product-binding partner interaction can be identified.

[0196] Also, binding partners of KLF12 molecules can be identified in a two-hybrid assay or three-hybrid assay (see, e.g., U.S. Pat. No.5,283,317; Zervos et al., Cell 72:223-232 (1993); Madura et al., J. Biol. Chem. 268: 12046-12054 (1993); Bartel et al., Biotechniques 14: 920-924 (1993); Iwabuchi et al., Oncogene 8: 1693-1696 (1993); and Brent WO94/10300), to identify other polypeptides, which bind to or interact with KLF12 (“KLF12-binding polypeptides” or “KLF12-bp”) and are involved in KLF12 activity. Such KLF12-bps can be activators or inhibitors of signals by the KLF12 polypeptides or KLF12 targets as, for example, downstream elements of a KLF12-mediated signaling pathway.

[0197] A two-hybrid system is based on the modular nature of most transcription factors, which consist of separable DNA-binding and activation domains. Briefly, the assay utilizes two different DNA constructs. In one construct, the gene that codes for a KLF12 polypeptide is fused to a gene encoding the DNA binding domain of a known transcription factor (e.g., GAL-4). In the other construct, a DNA sequence, from a library of DNA sequences, that encodes an unidentified polypeptide (“prey” or “sample”) is fused to a gene that codes for the activation domain of the known transcription factor. (Alternatively the: KLF12 polypeptide can be the fused to the activator domain.) If the “bait” and the “prey” polypeptides are able to interact, in vivo, forming a KLF12-dependent complex, the DNA-binding and activation domains of the transcription factor are brought into close proximity. This proximity allows transcription of a reporter gene (e.g., LacZ) which is operably linked to a transcriptional regulatory site responsive to the transcription factor. Expression of the reporter gene can be detected and cell colonies containing the functional transcription factor can be isolated and used to obtain the cloned gene which encodes the polypeptide which interacts with the KLF12 polypeptide.

[0198] Candidate therapeutics for treating cancer are identified from a group of test molecules that interact with a KLF12 nucleic acid or polypeptide. Test molecules are normally ranked according to the degree with which they interact or modulate (e.g., agonize or antagonize) DNA replication and/or processing, RNA transcription and/or processing, polypeptide production and/or processing, and/or function of KLF12 molecules, for example, and then top ranking modulators are selected. In an embodiment the candidate therapeutic (i.e., test molecule) acts as a KLF12 antagonist. In another embodiment, the candidate therapeutic is a siRNA molecule capable of inhibiting gene expression of KLF12 or, optionally, any of its transcripts. Also, pharmacogenomic information described herein can determine the rank of a modulator. Candidate therapeutics often are formulated for administration to a subject.

[0199] Therapeutic Treatments

[0200] Formulations or pharmaceutical compositions often include in combination with a pharmaceutically acceptable carrier, a compound, an antisense nucleic acid, a siRNA molecule capable of inhibiting the expression of KLF12 or, optionally, any of its transcripts, a ribozyme, an antibody, a binding partner that interacts with a KLF12 polypeptide, a KLF12 nucleic acid, or a fragment thereof. The formulated molecule may be one that is identified by a screening method described herein. As used herein, the term “pharmaceutically acceptable carrier” includes solvents, dispersion media, coatings, antibacterial and antifungal agents, isotonic and absorption delaying agents, and the like, compatible with pharmaceutical administration. Supplementary active compounds can also be incorporated into the compositions.

[0201] A pharmaceutical composition is formulated to be compatible with its intended route of administration. Examples of routes of administration include parenteral, e.g., intravenous, intradermal, subcutaneous, oral (e.g., inhalation), transdermal (topical), transmucosal, and rectal administration. Solutions or suspensions used for parenteral, intradermal, or subcutaneous application can include the following components: a sterile diluent such as water for injection, saline solution, fixed oils, polyethylene glycols, glycerin, propylene glycol or other synthetic solvents; antibacterial agents such as benzyl alcohol or methyl parabens; antioxidants such as ascorbic acid or sodium bisulfite; chelating agents such as ethylenediaminetetraacetic acid; buffers such as acetates, citrates or phosphates and agents for the adjustment of tonicity such as sodium chloride or dextrose. pH can be adjusted with acids or bases, such as hydrochloric acid or sodium hydroxide. The parenteral preparation can be enclosed in ampoules, disposable syringes or multiple dose vials made of glass or plastic.

[0202] Oral compositions generally include an inert diluent or an edible carrier. For the purpose of oral therapeutic administration, the active compound can be incorporated with excipients and used in the form of tablets, troches, or capsules, e.g., gelatin capsules. Oral compositions can also be prepared using a fluid carrier for use as a mouthwash. Pharmaceutically compatible binding agents, and/or adjuvant materials can be included as part of the composition. The tablets, pills, capsules, troches and the like can contain any of the following ingredients, or compounds of a similar nature: a binder such as microcrystalline cellulose, gum tragacanth or gelatin; an excipient such as starch or lactose, a disintegrating agent such as alginic acid, Primogel, or corn starch; a lubricant such as magnesium sfearate or Sterotes; a glidant such as colloidal silicon dioxide; a sweetening agent. such as sucrose or saccharin; or a flavoring agent such as peppermint, methyl salicylate, or orange flavoring.

[0203] Pharmaceutical compositions suitable for injectable use include sterile aqueous solutions (where water soluble) or dispersions and sterile powders for the extemporaneous preparation of sterile injectable solutions or dispersion. For intravenous administration, suitable carriers include physiological saline, bacteriostatic water, Cremophor ELTM (BASF, Parsippany, N.J.) or phosphate buffered saline (PBS). In all cases, the composition must be sterile and should be fluid to the extent that easy syringability exists. It should be stable under the conditions of rnanufacture and storage and must be preserved against the contaminating action of microorganisms such as bacteria and fungi. The carrier can be a solvent or dispersion medium containing, for example, water, ethanol, polyol (for example, glycerol, propylene glycol, and liquid polyethylene glycol, and the like), and suitable mixtures thereof. The proper fluidity can be maintained, for example, by the use of a coating such as lecithin, by the maintenance of the required particle size in the case of dispersion and by the use of surfactants. Prevention of the action of microorganisms can be achieved by various antibacterial and antifungal agents, for example, parabens, chlorobutanol, phenol, ascorbic acid, thimerosal, and the like. In many cases, isotonic agents, for example, sugars, polyalcohols such as mannitol, sorbitol, sodium chloride sometimes are included in the composition. Prolonged absorption of the injectable compositions can be brought about by including in the composition an agent which delays absorption, for example, aluminum monostearate and gelatin.

[0204] Sterile injectable solutions can be prepared by incorporating the active compound in the required amount in an appropriate solvent with one or a combination of ingredients enumerated above, as required, followed by filtered sterilization. Generally, dispersions are prepared by incorporating the active compound into a sterile vehicle which contains a basic dispersion medium and the required other ingredients from those enumerated above. In the case of sterile powders for the preparation of sterile injectable solutions, methods of preparation often utilized are vacuum drying and freeze-drying which yields a powder of the active ingredient plus any additional desired ingredient from a previously sterile-filtered solution thereof.

[0205] For administration by inhalation, the compounds are delivered in the form of an aerosol spray from pressured container or dispenser which contains a suitable propellant, e.g., a gas such as carbon dioxide, or a nebulizer.

[0206] Systemic administration can also be by transmucosal or transdermal means. For transmucosal or transdermal administration, penetrants appropriate to the barrier to be permeated are used in the formulation. Such penetrants are generally known in the art, and include, for example, for transmucosal administration, detergents, bile salts, and fusidic acid derivatives. Transmucosal administration can be accomplished through the use of nasal sprays or suppositories. For transdermal administration, the active compounds are formulated into ointments, salves, gels, or creams as generally known in the art. Molecules can also be prepared in the form of suppositories (e.g., with conventional suppository bases such as cocoa butter and other glycerides) or retention enemas for rectal delivery.

[0207] In one embodiment, active molecules are prepared with carriers that will protect the compound against rapid elimination from the body, such as a controlled release formulation, including implants and microencapsulated delivery systems. Biodegradable, biocompatible polymers can be used, such as ethylene vinyl acetate, polyanhydrides, polyglycolic acid, collagen, polyorthoesters, and polylactic acid. Methods for preparation of such formulations are apparent to those skilled in the art. Materials can also be obtained commercially from Alza Corporation and Nova Pharmaceuticals, Inc. Liposomal suspensions (including liposomes targeted to infected cells with monoclonal antibodies to viral antigens) can also be used as pharmaceutically acceptable carriers. These can be prepared according to methods known to those skilled in the art, for example, as described in U.S. Pat. No. 4,522,811.

[0208] It is advantageous to formulate oral or parenteral compositions in dosage unit form for ease of administration and uniformity of dosage. Dosage unit form as used herein refers to physically discrete units suited as unitary dosages for the subject to be treated; each unit containing a predetermined quantity of active compound calculated to produce the desired therapeutic effect in association with the required pharmaceutical carrier.

[0209] Toxicity and therapeutic efficacy of such compounds can be determined by standard pharmaceutical procedures in cell cultures or experimental animals, e.g., for determining the LD₅₀ (the dose lethal to 50% of the population) and the ED₅₀ (the dose therapeutically effective in 50% of the population). The dose ratio between toxic and therapeutic effects is the therapeutic index and it can be expressed as the ratio LD₅₀/ED₅₀. Molecules which exhibit high therapeutic indices often are utilized. While molecules that exhibit toxic side effects may be used, care should be taken to design a delivery system that targets such compounds to the site of affected tissue in order to minimize potential damage to uninfected cells and, thereby, reduce side effects.

[0210] The data obtained from the cell culture assays and animal studies can be used in formulating a range of dosage for use in humans. The dosage of such molecules often lies within a range of circulating concentrations that include the ED₅₀ with little or no toxicity. The dosage may vary within this range depending upon the dosage form employed and the route of administration utilized. For any molecules used in the methods described herein, the therapeutically effective dose can be estimated initially from cell culture assays. A dose may be formulated in animal models to achieve a circulating plasma concentration range that includes the IC₅₀ (i:e., the concentration of the test compound which achieves a half-maximal inhibition of symptoms) as determined in cell culture. Such information can be used to more accurately determine useful doses in humans. Levels in plasma may be measured, for example, by high performance liquid chromatography.

[0211] As defined herein, a therapeutically effective amount of protein or polypeptide (i.e., an effective dosage) ranges from about 0.001 to 30 mg/kg body weight, sometimes about 0.01 to 25 mg/kg body weight, often about 0.1 to 20 mg/kg body weight, and more often about 1 to 10 mg/kg, 2 to 9 mg/kg, 3 to 8 mg/kg, 4 to 7 mg/kg, or 5 to 6 mg/kg body weight. The protein or polypeptide can be administered one time per week for between about 1 to 10 weeks, sometimes between 2 to 8 weeks, often between about 3 to 7 weeks, and more often for about 4, 5, or 6 weeks. The skilled artisan will appreciate that certain factors may influence the dosage and timing required to effectively treat a subject, including but not limited to the severity of the disease or disorder, previous treatments, the general health and/or age of the subject, and other diseases present. Moreover, treatment of a subject with a therapeutically effective amount of a protein, polypeptide, or antibody can include a single treatment, or sometimes can include a series of treatments.

[0212] With regard to polypeptide formulations, featured herein is a method for treating cancer in a subject, which comprises contacting one or more cells in the subject with a first KLF12 polypeptide, where genomic DNA in the subject comprises a second KLF12 nucleic acid having one or more polymorphic variations associated with cancer, and where the first KLF12 polypeptide comprises fewer polymorphic variations associated with cancer than the first KLF12 polypeptide. The first and second KLF12 polypeptides are encoded by a nucleic acid which comprises a nucleotide sequence selected from the group consisting of the nucleotide sequence of SEQ. ID NO: 1; a nucleotide sequence which encodes a polypeptide consisting of an amino acid sequence set forth in FIGS. 3A or 3B; and a nucleotide sequence which encodes a polypeptide that is 90% identical to an amino acid sequence set forth in FIGS. 3A or 3B. The second KLF12 polypeptide also may be encoded by a fragment of the foregoing nucleic acids comprising the one or more polymorphic variations. The subject is often a human.

[0213] For antibodies, a dosage of 0.1 mg/kg of body weight (generally 10 mg/kg to 20 mg/kg) is often utilized. If the antibody is to act in the brain, a dosage of 50 mg/kg to 100 mg/kg is often appropriate. Generally, partially human antibodies and fully human antibodies have a longer half-life within the human body than other antibodies. Accordingly, lower dosages and less frequent administration is often possible. Modifications such as lipidation can be used to stabilize antibodies and to enhance uptake and tissue penetration (e.g., into the brain). A method for lipidation of antibodies is described by Cruikshank et al., J. Acquired Immune Deficiency Syndromes and Human Retrovirology 14:193 (1997).

[0214] Antibody conjugates can be used for modifying a given biological response, the drug moiety is not to be construed as limited to classical chemical therapeutic agents. For example, the drug moiety may be a protein or polypeptide possessing a desired biological activity. Such proteins may include, for example, a toxin such as abrin, ricin A, pseudomonas exotoxin, or diphtheria toxin; a polypeptide such as tumor necrosis factor, .alpha.-interferon, .beta.-interferon, nerve growth factor, platelet derived growth factor, tissue plasminogen activator; or, biological response modifiers such as, for example, lymphokines, interleukin-1 (“IL-1”), interleukin-2 (“IL-2”), interleukin-6 (“IL-6”), granulocyte macrophage colony stimulating factor (“GM-CSF”), granulocyte colony stimulating factor (“G-CSF”), or other growth factors. Alternatively, an antibody can be conjugated to a second antibody to form an antibody heteroconjugate as described by Segal in U.S. Pat. No. 4,676,980.

[0215] For compounds, exemplary doses include milligram or microgram amounts of the compound per kilogram of subject or sample weight, for example, about 1 microgram per kilogram to about 500 milligrams per kilogram, about 100 micrograms per kilogram to about 5 milligrams per kilogram, or about 1 microgram per kilogram to about 50 micrograms per kilogram. It is understood that appropriate doses of a small molecule depend upon the potency of the small molecule with respect to the expression or activity to be modulated. When one or more of these small molecules is to be administered to an animal (e.g., a human) in order to modulate expression or activity of a polypeptide or nucleic acid described herein, a physician, veterinarian, or researcher may, for example, prescribe a relatively low dose at first, subsequently increasing the dose until an appropriate response is obtained. In addition, it is understood that the specific dose level for any particular animal subject will depend upon a variety of factors including the activity of the specific compound employed, the age, body weight, general health, gender, and diet of the subject, the time of administration, the route of administration, the rate of excretion, any drug combination, and the degree of expression or activity to be modulated.

[0216] KLF12 nucleic acid molecules can be inserted into vectors and used in gene therapy methods for treating cancer. Featured herein is a method for treating cancer in a subject, which comprises contacting one or more cells in the subject with a first KLF12 nucleic acid, where genomic DNA in the subject comprises a second KLF12 nucleic acid comprising one or more polymorphic variations associated with cancer, and where the first KLF12 nucleic acid comprises fewer polymorphic variations associated with cancer. The first and second KLF12 nucleic acids often comprise a nucleotide sequence selected from the group consisting of the nucleotide sequence of SEQ ID NO: 1; a nucleotide sequence which encodes a polypeptide consisting of an amino acid sequence set forth in FIGS. 3A or 3B; and a nucleotide sequence which encodes a polypeptide that is 90% identical to an amino acid sequence set forth in FIGS. 3A or 3B. The second KLF12 nucleic acid may also be a fragment of the foregoing comprising one or more polymorphic variations. For example, the second KLF12 nucleic acid, or a fragment thereof, may contain an adenine at position 96535 of SEQ ID NO: 1. The subject is often a human.

[0217] Gene therapy vectors can be delivered to a subject by, for example, intravenous injection, local administration (see U.S. Pat. No. 5,328,470) or by stereotactic injection (see e.g., Chen et al., (1994) Proc. Natl. Acad Sci. USA 91:3054-3057). Pharmaceutical preparations of gene therapy vectors can include a gene therapy vector in an acceptable diluent, or can-comprise a slow release matrix in which the gene delivery vehicle is imbedded. Alternatively, where the complete gene delivery vector can be produced intact from recombinant cells (e.g., retroviral vectors) the pharmaceutical preparation can include one or more cells which produce the gene delivery system. Examples of gene delivery vectors are described herein.

[0218] Pharmaceutical compositions can be included in a container, pack, or dispenser together with instructions for administration.

[0219] Pharmaceutical compositions of active ingredients can be administered by any of the paths described herein for therapeutic and prophylactic methods for treating cancer. With regard to both prophylactic and therapeutic methods of treatment, such treatments may be specifically tailored or modified, based on knowledge obtained from pharmacogenomic analyses described herein. As used herein, the term “treatment” is defined as the application or administration of a therapeutic agent to a patient, or application or administration of a therapeutic agent to an isolated tissue or cell line from a patient, who has a disease, a symptom of disease or a predisposition toward a disease, with the purpose to cure, heal, alleviate, relieve, alter, remedy, ameliorate, improve or affect the disease, the symptoms of disease or the predisposition toward disease. A therapeutic agent includes, but is not limited to, small molecules, peptides, antibodies, ribozymes and antisense oligonucleotides.

[0220] Administration of a prophylactic agent can occur prior to the manifestation of symptoms characteristic of the KLF12 aberrance, such that a disease or disorder is prevented or, alternatively, delayed in its progression. Depending on the type of KLF12 aberrance, for example, a KLF12 molecule, KLF12 agonist, or KLF12 antagonist agent can be used for treating the subject. The appropriate agent can be determined based on screening assays described herein.

[0221] As discussed, successful treatment of KLF12 disorders can be brought about by techniques that serve to inhibit the expression or activity of target gene products. For example, compounds (e.g., an agent identified using an assays described above) that exhibit negative modulatory activity can be used to prevent and/or treat cancer. Such molecules can include, but are not limited to peptides, phosphopeptides, small organic or inorganic molecules, or antibodies (including, for example, polyclonal, monoclonal, humanized, anti-idiotypic, chimeric or single chain antibodies, and FAb, F(ab′)₂ and FAb expression library fragments, scFV molecules, and epitope-binding fragments thereof).

[0222] Further, antisense and ribozyme molecules that inhibit expression of the target gene can also be used to reduce the level of target gene expression, thus effectively reducing the level of target gene activity. Still further, triple helix molecules can be utilized in reducing the level of target gene activity. Antisense, ribozyme and triple helix molecules are discussed above.

[0223] It is possible that the use of antisense, ribozyme, and/or triple helix molecules to reduce or inhibit mutant gene expression can also reduce or inhibit the transcription (triple helix) and/or translation (antisense, ribozyme) of mRNA produced by normal target gene alleles, such that the concentration of normal target gene product present can be lower than is necessary for a normal phenotype. In such cases, nucleic acid molecules that encode and express target gene polypeptides exhibiting normal target gene activity can be introduced into cells via gene therapy method. Alternatively, in instances where the target gene encodes an extracellular polypeptide, normal target gene polypeptide often is co-administered into the cell or tissue to maintain the requisite level of cellular or tissue target gene activity.

[0224] Another method by which nucleic acid molecules may be utilized in treating or preventing a disease characterized by KLF12 expression is through the use of aptamer molecules specific for KLF12 polypeptide. Aptamers are nucleic acid molecules having a tertiary structure which permits them to specifically bind to polypeptide ligands (see, e.g., Osborne, et al., Curr. Opin. Chem. Biol 1(1): 5-9 (1997); and Patel, D. J., Curr. Opin. Chem. Biol. June;1(1): 32-46 (1997)). Since nucleic acid molecules may in many cases be more conveniently introduced into target cells than therapeutic polypeptide molecules may be, aptamers offer a method by which KLF12 polypeptide activity may be specifically decreased without the introduction of drugs or other molecules which may have pluripotent effects.

[0225] Antibodies can be generated that are both specific for target gene product and that reduce target gene product activity. Such antibodies may, therefore, by administered in instances whereby negative modulatory techniques are appropriate for the treatment of KLF12 disorders. For a description of antibodies, see the Antibody section above.

[0226] In circumstances where injection of an animal or a human subject with a KLF12 polypeptide or epitope for stimulating antibody production is harmful to the subject, it is possible to generate an immune response against KLF12 through the use of anti-idiotypic antibodies (see, for example, Herlyn, D., Ann. Med.;31(1): 66-78 (1999); and Bhattacharya-Chatterjee & Foon, Cancer Treat. Res.; 94: 51-68 (1998)). If an anti-idiotypic antibody is introduced into a mammal or human subject, it should stimulate the production of anti-anti-idiotypic antibodies, which should be specific to the KLF12 polypeptide. Vaccines directed to a disease characterized by KLF12 expression may also be generated in this fashion.

[0227] In instances where the target antigen is intracellular and whole antibodies are used, internalizing antibodies may be utilized. Lipofectin or liposomes can be used to deliver the antibody or a fragment of the Fab region that binds to the target antigen into cells. Where fragments of the antibody are used, the smallest inhibitory fragment that binds to the target antigen often is utilized. For example, peptides having an amino acid sequence corresponding to the Fv region of the antibody can be used. Alternatively, single chain neutralizing antibodies that bind to intracellular target antigens can also be administered. Such single chain antibodies can be administered, for example, by expressing nucleotide sequences encoding single-chain antibodies within the target cell population (see e.g., Marasco et al., Proc. Natl. Acad. Sci. USA 90. 7889-7893 (1993)).

[0228] KLF12 molecules and compounds that inhibit target gene expression, synthesis and/or activity can be administered to a patient at therapeutically effective doses to prevent, treat or ameliorate KLF12 disorders. A therapeutically effective dose refers to that amount of the compound sufficient to result in amelioration of symptoms of the disorders.

[0229] Toxicity and therapeutic efficacy of such compounds can be determined by standard pharmaceutical procedures in cell cultures or experimental animals, e.g., for determining the LD₅₀ (the dose lethal to 50% of the population) and the ED₅₀ (the dose therapeutically effective in 50% of the population). The dose ratio between toxic and therapeutic effects is the therapeutic index and it can be expressed as the ratio LD₅₀/ED₅₀. Compounds that exhibit large therapeutic indices often are utilized. While compounds that exhibit toxic side effects can be used, care should be taken to design a delivery system that targets such compounds to the site of affected tissue in order to minimize potential damage to unifected cells and, thereby, reduce side effects.

[0230] Data obtained from cell culture assays and animal studies can be used in formulating a range of dosage for use in humans. The dosage of such compounds often lies within a range of circulating concentrations that include the ED₅₀ with little or no toxicity. The dosage can vary within this range depending upon the dosage form employed and the route of administration utilized. For any compound used in a method described herein, the therapeutically effective dose can be estimated initially from cell culture assays. A dose can be formulated in animal models to achieve a circulating plasma concentration range that includes the IC₅₀ (i.e., the concentration of the test compound that achieves a half-maximal inhibition of symptoms) as determined in cell culture. Such information can be used to more accurately determine useful doses in humans. Levels in plasma can be measured, for example, by high performance liquid chromatography.

[0231] Another example of effective dose determination for an individual is the ability to directly assay levels of “free” and “bound” compound in the serum of the test subject. Such assays may utilize antibody mimics and/or “biosensors” that have been created through molecular imprinting techniques. The compound which is able to modulate KLF12 activity is used as a template, or “imprinting molecule”, to spatially organize polymerizable monomers prior to their polymerization with catalytic reagents. The subsequent removal of the imprinted molecule leaves a polymer matrix which contains a repeated “negative image” of the compound and is able to selectively rebind the molecule under biological assay conditions. A detailed review of this technique can be seen in Ansell et al., Current Opinion in Biotechnology 7: 89-94 (1996) and in Shea, Trends in Polymer Science 2: 166-173 (1994). Such “imprinted” affinity matrixes are amenable to ligand-binding assays, whereby the immobilized monoclonal antibody component is replaced by an appropriately imprinted matrix. An example of the use of such matrixes in this way can be seen in Vlatakis, et al., Nature 361: 645-647 (1993). Through the use of isotope-labeling, the “free” concentration of compound which modulates the expression or activity. of KLF12 can be readily monitored and used in calculations of IC₅₀. Such “imprinted” affinity matrixes can also be designed to include fluorescent groups whose photon-emitting properties measurably change upon local and selective binding of target compound. These changes can be readily assayed in real time using appropriate fiberoptic devices, in turn allowing the dose in a test subject to be quickly optimized based on its individual IC₅₀. A rudimentary example of such a “biosensor” is discussed in Kriz et al., Analytical Chemistry 67: 2142-2144 (1995).

[0232] Provided herein are methods of modulating KLF12 expression or activity for therapeutic purposes. Accordingly, in an exemplary embodiment, the modulatory method involves contacting a cell with a KLF12 or agent that modulates one or more of the activities of KLF12 polypeptide activity associated with the cell. An agent that modulates KLF12 polypeptide activity can be an agent as described herein, such as a nucleic acid or a polypeptide, a naturally-occurring target molecule of a KLF12 polypeptide (e.g., a KLF12 substrate or receptor), a KLF12 antibody, a KLF12 agonist or antagonist, a peptidomimetic of a KLF12 agonist or antagonist, or other small molecule.

[0233] In one embodiment, the agent stimulates one or more KLF12 activities. In another embodiment, the agent inhibits one or more KLF12 activities. Examples of such inhibitory agents include antisense KLF12 nucleic acid molecules, anti-KLF12 antibodies, KLF12 inhibitors, siRNA molecules capable of inhibiting the expression of KLF12 or, optionally, any KLF12 transcripts, and competitive inhibitors that target secondary regulatory genes, such as AP-2, that are regulated by KLF12. These modulatory methods can be performed in vitro (e.g., by culturing the cell with the agent) or, alternatively, in vivo (e.g., by administering the agent to a subject). As such, provided are methods of treating an individual afflicted with a disease or disorder characterized by aberrant or unwanted expression or activity of a KLF12 polypeptide or nucleic acid molecule. In one embodiment, the method involves administering an agent (e.g., an agent identified by a screening assay described herein), or combination of agents that modulates (e.g., upregulates or downregulates) KLF12 expression or activity. In an embodiment, the method involves administering an agent (e.g., an agent identified by a screening assay described herein or an siRNA molecule capable: of inhibiting the expression of KLF12, or any of its transcripts), or a combination of agents that inhibits KLF12 expression or activity (e.g., a KLF12 activity may include inhibiting the expression of secondary regulatory genes, such as AP-2, that play a role in oncogenesis). In another embodiment, the method involves administering a KLF12 polypeptide or nucleic acid molecule as therapy to compensate for reduced, aberrant, or unwanted KLF12 expression or activity.

[0234] Stimulation of KLF12 activity is desirable in situations in which KLF12 is abnormally downregulated and/or in which increased KLF12 activity is likely to have a beneficial effect. For example, stimulation of KLF12 activity is desirable in situations in which a KLF12 is downregulated and/or in which increased KLF12 activity is likely to have a beneficial effect. Likewise, inhibition of KLF12 activity is desirable in situations in which KLF12 is abnormally upregulated and/or in which decreased KLF12 activity is likely to have a beneficial effect.

[0235] Methods of Treatment

[0236] It is known that AP-2a transactivates the cyclin dependent kinase inhibitor, p21WAF1/CIP1 promoter, resulting in G1 and G2 cell cycle arrest. This role of AP-2a is relevant to its reported tumor suppressor activity in cancer, since the tumor suppressor function of AP-2a is facilitated by release of repression driven by transient inhibition of KLF12 with the transfected siKLF1 reagent (see Example 7). Regardless of the precise mechanism, KFL12 overexpression is implicated in the regulation of the growth pattern of selected tumor cell lines (see Example 8). Though not wishing to be bound or limited by any proposed mechanism for the observed effect, it is expected that inhibiting the overexpression of KLF12 and thereby increasing the expression of AP-2a results in growth arrest and cell death via the cell cycle inhibitor p21 WAF1/CIP1 or a similar inhibitor.

[0237] Alternatively, it is possible that KLF12 has an oncogenic role in cancer similar to a highly homologous protein, Wilm's tumor 1 protein (WT1) (Zapata-Benavides P, et al. Biochem Biophys Res Commun. 2002 July 26;295(4):784-90). Zapata-Benavides et al. used antisense molecules to knock down WT1 expression and saw decreased proliferation in several breast cancer cell lines. WT1 is very homologous to KLF12, with 4 Kruppel-type zinc fingers, and both proteins share a highly related consensus DNA binding sequence (Imhof et al. Mol Cell Biol 1999 January;19(1):194-204)) and (Roth et al. Genomics 63:384-390 (2000)). Therefore, it is believed WT1 and KLF12 share similar functions as human transcription repressors.

[0238] Thus, provided are methods for identifying a risk of cancer in an individual as described herein and, if a genetic predisposition is identified, treating that individual to delay or reduce or prevent the development of cancer. Such a procedure can be used to treat cancer. Optionally, treating an individual for cancer may include inhibiting cellular proliferation, inhibiting metastasis, inhibiting invasion, or preventing tumor formation or growth as defined herein. Suitable treatments to prevent or reduce or delay cancer focus on inhibiting additional cellular proliferation, inhibiting metastasis, inhibiting invasion, and preventing further tumor formation or growth. In the case of breast cancer, treatment usually includes surgery followed by radiation therapy. Surgery may be a lumpectomy or a mastectomy (e.g., total, simple or radical). Even if the doctor removes all of the cancer that can be seen at the time of surgery, the patient may be given radiation therapy, chemotherapy, or hormone therapy after surgery to try to kill any cancer cells that may be left. Radiation therapy is the use of x-rays or other types of radiation to kill cancer cells and shrink tumors. Radiation therapy may use external radiation (using a machine outside the body) or internal radiation. Chemotherapy is the use of drugs to kill cancer cells. Chemotherapy may be taken by mouth, or it may be put into the body by inserting a needle into a vein or muscle. Hormone therapy often focuses on estrogen and progesterone, which are hormones that affect the way some cancers grow. If tests show that the cancer cells have estrogen and progesterone receptors (molecules found in some cancer cells to which estrogen and progesterone will attach), hormone therapy is used to block the way these hormones help the cancer grow. Hormone therapy with tamoxifen is often given to patients with early stages of breast cancer and those with metastatic breast cancer. Other types of treatment being tested in clinical trials include sentinel lymph node biopsy followed by surgery and high-dose chemotherapy with bone marrow transplantation and peripheral blood stem cell transplantation. Any preventative/therapeutic treatment known in the art may be prescribed and/or administered, including, for example, surgery, chemotherapy and/or radiation treatment, and any of the treatments may be used in combination with one another to treat or prevent breast cancer (e.g., surgery followed by radiation therapy).

[0239] Also provided are methods of preventing or treating cancer comprising providing an individual in need of such treatment with a KLF12 inhibitor that reduces or inhibits the overexpression of mutant KLF12 (e.g., a KLF12 polynucleotide with an allele that is associated with cancer set forth in Table 10 and Table 12). Included herein are methods of reducing or blocking the expression of KLF12 comprising providing or administering to individuals in need of reducing or blocking the expression of KLF12 a pharmaceutical or physiologically acceptable composition comprising a molecule capable of inhibiting expression of KLF12, e.g., a siRNA molecule. Also included herein are methods of reducing or blocking the expression of secondary regulatory genes regulated by KLF12, such as AP-2, that play a role in oncogenesis which comprises introducing competitive inhibitors that target KLF12's effect on these regulatory genes or that block the binding of positive factors, e.g., KLF12, necessary for the expression of these regulatory genes.

[0240] The examples set forth below are intended to illustrate but not limit the invention.

### EXAMPLES

[0241] In the following studies a group of subjects were selected according to specific parameters relating to breast cancer. Nucleic acid samples obtained from individuals in the study group were subjected to genetic analysis, which identified associations between breast cancer and polymorphisms in the KLF12 gene and regions surrounding the gene on chromosome three. Methods are described for producing KLF12 polypeptide and KLF12 polypeptide variants in vitro or in vivo, KLF12 nucleic acids or polypeptides and variants thereof are utilized for screening test molecules for those that interact with KLF12 molecules. Test molecules identified as interactors with KLF12 molecules and KLF12 variants are further screened in vivo to determine whether they treat breast cancer. Also, methods are described for comparing the expression of KLF12 in cancer and non-cancer cells, producing siRNA molecules capable of inhibiting KLF12 expression, measuring the effect of siRNA molecules that target KLF12 on cellular proliferation, and screening for KLF12 inhibitors.

### Example 1

### Samples and Pooling Strategies

Sample Selection

[0242] Blood samples were collected from individuals diagnosed with breast cancer, which were referred to as case samples. Also, blood samples were collected from individuals not diagnosed with breast cancer as gender and age-matched controls. All of the samples were of German/German descent. A database was created that listed all phenotypic trait information gathered from individuals for each case and control sample. Genomic DNA was extracted from each of the blood samples for genetic analyses.

DNA Extraction from Blood Samples

[0243] Six to ten milliliters of whole blood was transferred to a 50 ml tube containing 27 ml of red cell lysis solution (RCL). The tube was inverted until the contents were mixed. Each tube was incubated for 10 minutes at room temperature and inverted once during the incubation. The tubes were then centrifuged for 20 minutes at 3000×g and the supernatant was carefully poured off. 100-200 μl of residual liquid was left in the tube and was pipetted repeatedly to resuspend the pellet in the residual supernatant. White cell lysis solution (WCL) was added to the tube and pipetted repeatedly until completely mixed. While no incubation was normally required, the solution was incubated at 37° C. or room temperature if cell clumps were visible after mixing until the solution was homogeneous. 2 ml of protein precipitation was added to the cell lysate. The mixtures were vortexed vigorously at high speed for 20 sec to mix the protein precipitation solution uniformly-with the cell lysate, and then centrifuged for 10 minutes at 3000×g. The supernatant containing the DNA was then poured into a clean 15 ml tube, which contained 7 ml of 100% isopropanol. The samples were mixed by inverting the tubes gently until white threads of DNA were visible. Samples were centrifuged for 3 minutes at 2000×g and the DNA was visible as a small white pellet. The supernatant was decanted and 5 ml of 70% ethanol was added to each tube. Each tube was inverted several times to wash the DNA pellet, and then centrifuged for 1 minute at 2000×g. The ethanol was decanted and each tube was drained on clean absorbent paper. The DNA was dried in the tube by inversion for 10 minutes, and then 1000 μl of 1×TE was added. The size of each sample was estimated, and less TE buffer was added during the following DNA hydration step if the sample was smaller. The DNA was allowed to rehydrate overnight at room temperature, and DNA samples were stored at 2-8° C.

[0244] DNA was quantified by placing samples on a hematology mixer for at least 1 hour. DNA was serially diluted (often 1:80, 1:160, 1:320, and 1:640 dilutions) so that it was within the measurable range of standards. 125 μl of diluted DNA was transferred to a clear U-bottom microtiter plate, and 125 μl of 1×TE buffer was transferred into each well using a multichannel pipette. The DNA and 1×TE were mixed by repeated pipetting at least 15 times, and then the plates were sealed. 50 μl of diluted DNA was added to wells A5-H12 of a black flat bottom microtiter plate. Standards were inverted six times to mix them, and then 50 μl of 1×TE buffer was pipetted into well A1, 1000 ng/ml of standard was pipetted into well A2, 500 ng/ml of standard was pipetted into well A3, and 250 ng/ml of standard was pipetted into well A4. PicoGreen (Molecular Probes, Eugene, Oreg.) was thawed and freshly diluted 1:200 according to the number of plates that were being measured. PicoGreen was vortexed and then 50 μl was pipetted into all wells of the black plate with the diluted DNA. DNA and PicoGreen were mixed by pipetting repeatedly at least 10 times with the multichannel pipette. The plate was placed into a Fluoroskan Ascent Machine (microplate fluorometer produced by Labsystems) and the samples were allowed to incubate for 3 minutes before the machine was run using filter pairs 485 nm excitation and 538 nm emission wavelengths. Samples having measured DNA concentrations of greater than 450 ng/μl were re-measured for conformation. Samples having measured DNA concentrations of 20 ng/μl or less were re-measured for confirmation.

Pooling Strategies

[0245] Samples were placed into one of two groups based on disease status. The two groups were female case groups and female control groups. A select set of samples from each group were utilized to generate pools, and one pool was created for each group. Each individual sample in a pool was represented by an equal amount of genomic DNA. For example, where 25 ng of genomic DNA was utilized in each PCR reaction and there were 200 individuals in each pool,each individual provided 125 pg of genomic DNA. Inclusion or exclusion of samples for a pool was based upon the following criteria: the sample was derived from an individual characterized as Caucasian; the sample was derived from an individual of German paternal and maternal descent; the database included relevant phenotype information for the individual; case samples Were derived from individuals diagnosed with breast cancer; control samples were derived from individuals free of cancer and no family history of breast cancer; and sufficient genomic DNA was extracted from each blood sample for all allelotyping and genotyping reactions performed during the study. Phenotype information included pre- or post-menopausal, familial predisposition, country or origin of mother and father, diagnosis with breast cancer (date of primary diagnosis, age of individual as of primary diagnosis, grade or stage of development, occurrence of metastases, e.g., lymph node metastases, organ metastases), condition of body tissue (skin tissue, breast tissue, ovary tissue, peritoneum tissue and myometrium), method of treatment (surgery, chemotherapy, hormone therapy, radiation therapy). Samples that met these criteria were added to appropriate pools based on gender and disease status.

[0246] The selection process yielded the pools set forth in Table 2, which were used in the studies that follow:

TABLE 2

| | Female CASE | Female CONTROL |
|---|---|---|
| Pool size | 272 | 276 |
| (Number) | | |
| Pool Criteria | case | control |
| (ex: case/control) | | |
| Mean Age | 59.6 | 55.4 |
| (ex: years) | | |

### Example 2

### Association of Polymorphic Variants with Breast Cancer

[0247] A whole-genome screen was performed to identify particular SNPs associated with occurrence of breast cancer. As described in Example. 1, two sets of samples were utilized, which included samples from female individuals having breast cancer (breast cancer cases) and samples from female individuals not having cancer (female controls). The initial screen of each pool was performed in an allelotyping study, in which certain samples in each group were pooled. By pooling DNA from each group, an allele frequency for each SNP in each group was calculated. These allele frequencies were then compared to one another. Particular SNPs were considered as being associated with breast cancer when allele frequency differences calculated between case and control pools were statistically significant. SNP disease association results obtained from the allelotyping study were then validated by genotyping each associated SNP across all samples from each pool. The results of the genotyping were then analyzed, allele frequencies for each group were calculated from the individual genotyping results, and a p value was calculated to determine whether the case and control groups had statistically significantly differences in allele frequencies for a particular SNP. When the genotyping results agreed with the original allelotyping results, the SNP disease association was considered validated at the genetic level.

[0248] It was discovered that females having a cytosine at position 96535 of SEQ ID NO: 1 were predisposed to breast cancer. This represents the incident SNP. Subsequently, proximal SNPs in and around the KLF12 gene were identified and allelotyped and a subset of the proximal SNPs were associated with breast cancer occurance. See, Example 3, “Identification of Proximal Polymorphic Variants in and around the KLF12 Gene”.

SNP Panel Used for Genetic Analyses

[0249] A whole-genome SNP screen began with an initial screen of approximately 25,000 SNPs over each set of disease and control samples using a pooling approach. The pools studied in the screen are described in Example 1. The SNPs analyzed in this study were part of a set of 25,488 SNPs confirmed as being statistically polymorphic as each is characterized as having a minor allele frequency of greater than 10%. The SNPs in the set reside in genes or in close proximity to genes, and many reside in gene exons. Specifically, SNPs in the set are located in exons, introns, and within 5,000 base-pairs upstream of a transcription start site of a gene. In addition, SNPs were selected according to the following criteria: they are located in ESTs; they are located in Locuslink or Ensembl genes; and they are located in Genomatix promoter predictions. SNPs in the set also were selected on the basis of even spacing across the genome, as depicted in Table 2.

[0250] A case-control study design using a whole genome association strategy involving approximately 28,000 single nucleotide polymorphisms (SNPs) was employed. Approximately 25,000 SNPs were evenly spaced in gene-based regions of the human genome with a median inter-marker distance of about 40,000 base pairs. Additionally, approximately 3,000 SNPs causing amino acid substitutions in genes described in the literature as candidates for various diseases were used. The case-control study samples were of female German origin (German paternal and maternal descent) 548 individuals were equally distributed in two groups (female controls and female cases). The whole genome association approach was first conducted on 2 DNA pools representing the 2 groups. Significant markers were confirmed by individual genotyping.

TABLE 3

| General Statistics | | Spacing Statistics | | |
|---|---|---|---|---|
| Total # of SNPs | 25,488 | Median | 37,058 | bp |
| # of Exonic SNPs | >4,335 (17%) | Minimum* | 1,000 | bp |
| # SNPs with refSNP ID | 20,776 (81%) | Maximum* | 3,000,000 | bp |
| Gene Coverage | >10,000 | Mean | 122,412 | bp |
| Chromosome Coverage | All | Std | 373,325 | bp |
| | | Deviation | | |

*Excludes outliers

Allelotyping and Genotyping Results

[0251] The genetic studies summarized above and described in more detail below identified an allelic variant associated with breast cancer, set forth in Table 4.

TABLE 4

| dbSNP | Position in SEQ | Allele | Cancer Associated |
|---|---|---|---|
| rs# | ID NO: 1 | Variants | Allele |
| rs1011058 | 96535 | C/T | C |

Assay for Verifying, Allelotyping, and Genotyping SNPs

[0252] A MassARRAY™ system (Sequenom, Inc.) was utilized to perform SNP genotyping in a high-throughput fashion. This genotyping platform was complemented by a homogeneous, single-tube assay method (hME™ or homogeneous MassEXTEND™ (Sequenom, Inc.)) in which two genotyping primers anneal to and amplify a genomic target surrounding a polymorphic site of interest. A third primer (the MassEXTEND™ primer), which is complementary to the amplified target up to but not including the polymorphism, was then enzymatically extended one or a few bases through the polymorphic site and then terminated.

[0253] For each polymorphism, SpectroDESIGNER™ software (Sequenom, Inc.) was used to generate a set of PCR primers and a MassEXTEND™ primer was used to genotype the polymorphism. Other primer design software could be used or one of ordinary skill in the art could manually design primers based on his or her knowledge of the relevant factors and considerations in designing such primers. Table 5 shows PCR primers and Table 6 shows extension primers used for analyzing polymorphisms. The initial PCR amplification reaction was performed in a 5 μl total volume containing 1×PCR buffer with 1.5 mM MgCl₂ (Qiagen), 200 μM each of dATP, dGTP, dCTP, dTTP (Gibco-BRL), 2.5 ng of genomic DNA, 0.1 units of HotStar DNA polymerase (Qiagen), and 200 nM each of forward and reverse PCR primers specific for the polymorphic region of interest.

TABLE 5
PCR Primers

| Refer- | | |
|---|---|---|
| ence | Forward | Reverse |
| SNP ID | PCR primer | PCR primer |
| rs | TGCAACACTCTGGTTACTTC | GCTAACTCCCAAATTGTACC |
| 1011058 | | |

[0254] Samples were incubated at 95° C. for 15 minutes, followed by 45 cycles of 95° C. for 20 seconds, 56° C. for 30 seconds, and 72° C. for 1 minute, finishing with a 3 minute final extension at 72° C. Following amplification, shrimp alkaline phosphatase (SAP) (0.3 units in a 2 μl volume) (Amersham Pharmacia) was added to each reaction (total reaction volume was 7 μl) to remove any residual dNTPs that were not consumed in the PCR step. Samples were incubated for 20 minutes at 37° C., followed by 5 minutes at 85° C. to denature the SAP.

[0255] Once the SAP reaction was complete, a primer extension reaction was initiated by adding a polymorphism-specific MassEXTEND™ primer cocktail to each sample. Each MassEXTEND™ cocktail included a specific combination of dideoxynucleotides (ddNTPs) and deoxynucleotides (dNTPs) used to distinguish polymorphic alleles from one another. Methods for verifying, allelotyping and genotyping SNPs are disclosed, for example, in U.S. Pat. No. 6,258,538, the content of which is hereby incorporated by reference. In Table 6, ddNTPs are shown and the fourth nucleotide not shown is the dNTP.

TABLE 6

| | | |
|---|---|---|
| Reference | | Term |
| SNP ID | Extend Probe | Mix |

| | | |
|---|---|---|
| rs1011058 | AACACTCTGGTTACTTCTTATTT | ACG |

[0256] The MassEXTEND™ reaction was performed in a total volume of 9 μl, with the addition of 1× ThermoSequenase buffer, 0.576 units of ThermoSequenase (Amersham Pharmacia), 600 nM MassEXTEND™ primer, 2 mM of ddATP and/or ddCTP and/or ddGTP and/or ddTTP, and 2 mM of dATP or dCTP or dGTP or dTTP. The deoxy nucleotide (dNTP) used in the assay normally was complementary to the nucleotide at the polymorphic site in the amplicon. Samples were incubated at 94° C. for 2 minutes, followed by 55 cycles of 5 seconds at 94° C., 5 seconds at 52° C., and 5 seconds at 72° C.

[0257] Following incubation, samples were desalted by adding 16 μl of water (total reaction volume was 25 μl), 3 mg of SpectroCLEAN™ sample cleaning beads (Sequenom, Inc.) and allowed to incubate for 3 minutes with rotation. Samples were then robotically dispensed using a piezoelectric dispensing device (SpectroJET™ (Sequenom, Inc.)) onto either 96-spot or 384-spot silicon chips containing a matrix that crystallized each sample (SpectroCHIP® (Sequenom, Inc.)). Subsequently, MALDI-TOF mass spectrometry (Biflex and Autoflex MALDI-TOF mass spectrometers (Bruker Daltonics) can be used) and SpectroTYPER RT™ software (Sequenom, Inc.) were used to analyze and interpret the SNP genotype for each sample.

[0258] Genetic Analysis

[0259] Variations identified in or around the KLF12 gene are represented by SEQ ID NO: 1 at position 96535. Minor allelic frequencies for this and all polymorphisms were verified as being 10% or greater by determining the allelic frequencies using the extension assay described above in a group of samples isolated from 92 individuals originating from the state of Utah in the United States, Venezuela and France (Coriell cell repositories).

[0260] Genotyping results are shown for female pools in Table 7. In the subsequent tables, “AF” refers to allelic frequency; and “F case” and “F control” refer to female case and female control groups, respectively.

TABLE 7

| Reference | AF | AF | | |
|---|---|---|---|---|
| SNP ID | F case | F control | p-value | Odds Ratio |
| rs1011058 | T = 0.819 | T = 0.891 | 0.0013 | 1.8 |
| | C = 0.181 | C = 0.109 | | |

[0261] As can be seen in Table 6, a cytosine at position 96535 were more common in the female breast cancer group. Genotyping results were considered significant with a calculated p-value of less than 0.05 for genotype results.

[0262] Odds ratio results are shown in Table 6. An odds ratio is an unbiased estimate of relative risk which can be obtained from most case-control studies. Relative risk (RR) is an estimate of the likelihood of disease in the exposed group (susceptibility allele or genotype carriers) compared to the unexposed group (not carriers). It can be calculated by the following equation:
RR=I_{A}/Iₐ
[0263] I_{A} is the incidence of disease in the A carriers and Iₐ is the incidence of disease in the non-carriers.
[0264] RR>1 indicates the A allele increases disease susceptibility.
[0265] RR<1 indicates the a allele increases disease susceptibility.

[0266] For example, RR=1.5 indicates that carriers of the A allele have 1.5 times the risk of disease than non-carriers, i.e., 50% more likely to get the disease.

[0267] Case-control studies do not allow the direct estimation of I_{A} and Iₐ therefore relative risk cannot be directly estimated. However, the odds ratio (OR) can be calculated using the following equation:
OR=(n_{DA}n_{da})/(n_{dA}n_{Da})=p_{DA}(1−p_{dA})/p_{dA}(1−p_{DA}), or
OR=((case f)/(1−case f))/((control f)/(1−control f)), where f=susceptibility allele frequency.

[0268] An odds ratio can be interpreted in the same way a relative risk is interpreted and can be directly estimated using the data from case-control studies, i.e., case and control allele frequencies. The higher the odds ratio value, the larger the effect that particular allele has on the development of breast cancer, thus possessing that particular allele translates to having a higher risk of developing breast cancer.

### Example 3

### Identification of Proximal Polymorphic Variants in and around the KLF12 Gene

[0269] Polymorphic variants proximal to the incident SNP were identified and allelotyped as described in Example 2. The polymorphic variants represent intronic, intragenic and exonic SNPs that fall 50 kb 5′ and 50 kb 3′ of the incident SNP (rs1011058).

[0270] For each polymorphism, SpectroDESIGNER™ software (Sequenom, Inc.) was used to generate a set of PCR primers and a MassEXTEND™ primer was used to genotype the polymorphism. Other primer design software could be used or one of ordinary skill in the art could manually design primers based on his or her knowledge of the relevant factors and considerations in designing such primers. Table 8 shows PCR primers and Table 9 shows extension primers used for allelotyping the polymorphisms.

TABLE 8
PCR Primers

| SNP | | |
|---|---|---|
| Reference | Forward PCR primer | Reverse PCR primer |
| 3812851 | ACGTTGGATGCTGACTCCAAGAGTCAGTAA | ACGTTGGATGCACCTGATACTAGGTAATTG |
| 3812850 | ACGTTGGATGCAGCAAATGCTTGGTGATAC | ACGTTGGATGATCAGGTGATATGTGTCTGC |
| 2325555 | ACGTTGGATGCTCTCAGAGCCTTTCTGAAG | ACGTTGGATGTACAGTCACGTATTAGTGCC |
| 1535802 | ACGTTGGATGTTTCAAAACGCCCTTTCATC | ACGTTGGATGGGGTCAATACTACCTATTGTG |
| 1535801 | ACGTTGGATGGGGTCTTTTCAAGATAGGCC | ACGTTGGATGCAGTCACCTGCTTTTTGCTC |
| 718569 | ACGTTGGATGGAAGTCATCATTACCATGGC | ACGTTGGATGCTGTAGTTTAGTGGTGCTTC |
| 2325556 | ACGTTGGATGCAACACTCTTAGGTTTCAAGG | ACGTTGGATGCTCTTAGTTATCGAGTAGCC |
| 2274086 | ACGTTGGATGCTGCAGGGTGGTGTTACATT | ACGTTGGATGGAGGAGGTAAAGTCATTAAAG |
| 1886235 | ACGTTGGATGCACATTTGGCTCAAATGCAG | ACGTTGGATGCTACCCTTCACATTATAAACC |
| 1886234 | ACGTTGGATGTCAAGGGCGTGCAATTGTAG | ACGTTGGATGCAGAGGAATCTGCACAACAC |
| 2325558 | ACGTTGGATGGCCTTTTTTTAAGTATGGGA | ACGTTGGATGAGGTGAGATGATTAGGCATG |
| 2325559 | ACGTTGGATGAAGTAATACAGCCACAGTTC | ACGTTGGATGAAAAGTGGGCTCAATATCTG |
| 2325560 | ACGTTGGATGGGTTAACTTTGTGGAATGGAG | ACGTTGGATGCGATTCTTTAGAGAAGCGAT |
| 3764134 | ACGTTGGATGAGACTGTATACTCACCAAGG | ACGTTGGATGCTCTGTCTACAGGGTACATC |
| 3764133 | ACGTTGGATGTGGGAGTCTTCAGAGTGAAC | ACGTTGGATGTTCCTACGCCTGCAAATCTG |
| 2025426 | ACGTTGGATGAGAGAATACCATCACTCTGG | ACGTTGGATGATCAAGATGTTGCATCCCAC |
| 2025425 | ACGTTGGATGAGCACAGTAGGTAAGACTGC | ACGTTGGATGCTATCCAGGTAATTCCAGGG |
| 1324059 | ACGTTGGATGGTCTTGGCTGCTGAGTAAAG | ACGTTGGATGCTCAACTTCTCAGCAGCAAC |
| 2325561 | ACGTTGGATGAAATCCTTTGATGGCTGTCC | ACGTTGGATGAGAGGGAAAGGTTTAGCGAG |
| 2875666 | ACGTTGGATGAAATCCGACTGTGCCAGTTC | ACGTTGGATGTACAGGTGTCGTGTGTTGTG |
| 1408248 | ACGTTGGATGCCAATACAAAGTAGGCACAC | ACGTTGGATGTGCAGCAACACATCTTTAGG |
| 1324058 | ACGTTGGATGGCTACTAGACTGTTTCTCTG | ACGTTGGATGCAAGTCTTCATCGTAGTCAC |
| 1011059 | ACGTTGGATGGGCATTGACAGGCTAAATGC | ACGTTGGATGGGTACAATTTGGGAGTTAGC |
| 1011058 | ACGTTGGATGTGCAACACTCTGGTTACTTC | ACGTTGGATGGCTAACTCCCAAATTGTACC |
| 2325563 | ACGTTGGATGCCACCAGTTAGTTCTAGATC | ACGTTGGATGGCAATGCAACAACATGCAAG |
| 2325564 | ACGTTGGATGTACAGAGCTTGACAAAAGGC | ACGTTGGATGCTACAAAATGAGAGGTTAATC |
| 879800 | ACGTTGGATGTCTTCTTCAGTTGGTCAGTG | ACGTTGGATGAATAACAAGTGCAGAGGCCC |
| 2325565 | ACGTTGGATGCACCCCCTCCACTAGAATAT | ACGTTGGATGGCACTGTATCCATCAGACAC |
| 255595 | ACGTTGGATGCCCATAATCCTGGCACATTA | ACGTTGGATGTGGTAGTCTCTGAAGTGAGG |
| 2875667 | ACGTTGGATGTGTTTCATTGCACACTTCCC | ACGTTGGATGATGCCAGGACCCATCAATAG |
| 2325566 | ACGTTGGATGAACTATTGATGGGTCCTGGC | ACGTTGGATGGGAGATGCCAGATTCATTAC |
| 2325567 | ACGTTGGATGGTAATGAATCTGGCATCTCC | ACGTTGGATGGTAATAGTGCAAATGCCTGTC |
| 2325568 | ACGTTGGATGTGAATCTGGCATCTCCCATG | ACGTTGGATGGTAATAGTGCAAATGCCTGTC |
| 1998572 | ACGTTGGATGTCCTTTGAAAAGTAGTACTC | ACGTTGGATGTGAAATCTAACCCTGCGGTC |
| 1998573 | ACGTTGGATGACAGAATAGCTTTTTGGAAG | ACGTTGGATGCGGTCCAGGTAAAAGGACAG |
| Unknown | ACGTTGGATGAAACACTCCATTCTCTGCCC | ACGTTGGATGTTCTAGCTGTGAACTGGCAC |
| 1324061 | ACGTTGGATGTCAGAACATTGTGCCGTTTC | ACGTTGGATGTGCTCTTGAACTCTATCCTG |
| 2209726 | ACGTTGGATGCTTGTACTGGAAAGTAGCCC | ACGTTGGATGGGAGGATCTTGAGTCCTTTC |
| 2225100 | ACGTTGGATGCCAAAGCTTTACGCTTCTCC | ACGTTGGATGGACTCTGGAGGAAGTCTTAC |

[0271] TABLE 9

| SNP | | Term |
|---|---|---|
| Reference | Extend Probe | Mix |
| 3812851 | CCCTATACTAGAAAAGTCACCA | ACG |
| 3812850 | CATTAAAGTTCCTGCTTGAC | ACT |
| 2325555 | AGCCTTTCTGAAGAAGACAAG | ACT |
| 1535802 | GAAATTCACAACCAACCCTTG | ACT |
| 1535801 | AGATAGGCCTTTATAAACCCTTT | CGT |
| 718569 | CCATGGCTAATAGAGAATGTG | ACG |
| 2325556 | TTAGGTTTCAAGGAGAATG | ACT |
| 2274086 | CCTCCAAATTCTCATCTTTTCTT | ACT |
| 1886235 | TGCAAGAAAGAGTGGCAAAT | CGT |
| 1886234 | GCAATTGTAGGAAGGTAAATAA | ACT |
| 2325558 | TTTTTAAGTATGGGAAGATGAT | ACG |
| 2325559 | AACTTTGTGGAATGGAGTAA | ACT |
| 2325560 | TAAACAAATACAGATATTGAGCC | ACG |
| 3764134 | AAACTTTTGATTATTCATTCGATT | ACT |
| 3764133 | AACATTATGACAGACCTGTT | ACT |
| 2025426 | GTTTTCAATGTTTTCATAAACCTA | ACG |
| 2025425 | CTGCAGGCTCTGTAGAGCA | ACT |
| 1324059 | CTGAGTAAAGAAGCTGTTCAAG | ACT |
| 2325561 | AACCATTTACCACAACACAC | ACT |
| 2875666 | GTGCCAGTTCCAATCTT | ACT |
| 1408248 | GGCACACATTACATACTGTT | ACT |
| 1324058 | GGGTGCTGGCATTGACAGGCTA | CGT |
| 1011059 | GACAGGCTAAATGCTAAGTGAC | CGT |
| 1011058 | AACACTCTGGTTACTTCTTATTT | ACG |
| 2325563 | TGTATGGAATCGTGTTCTTTT | ACT |
| 2325564 | CAAAATCTGTGAAACATAGTTAT | ACT |
| 879800 | GTGAAATTGTTCATTTACTCTTTG | ACG |
| 2325565 | CCACTAGAATATTAAGCACCA | ACG |
| 255595 | GGCACATTAAAAGATGCTTC | ACT |
| 2875667 | TGTTTACACATGCACATTC | ACT |
| 2325566 | CCTGGCATTCTAGGGCT | ACT |
| 2325567 | ATCTGGCATCTCCCATGATA | ACG |
| 2325568 | CATCTCCCATGATACACA | ACG |
| 1998572 | CTTTGAAAAGTAGTACTCATATGT | ACT |
| 1998573 | GTTCATCCTTTGAAAAGTAG | ACT |
| Unknown | CATTCTCTGCCCTAATCTC | ACG |
| 1324061 | TTCCTGCTTTGGCAAATTCACG | ACT |
| 2209726 | AAGTAGCCCATGAGGTC | ACT |
| 2225100 | CCTCAAATGCCACCTAC | ACT |

[0272] Table 10 shows allelotyping results in female breast cancer and female control pools. Allele frequency is noted in the fifth and sixth columns for breast cancer pools and control pools.

TABLE 10

| | | Position in | | | Cancer | | | |
|---|---|---|---|---|---|---|---|---|
| Rs | Chromosome | SEQ ID | Gene | | Associated | Case | Control | |
| number | Position | NO: 1 | Location | Alleles | Allele | AF | AF | p-Value |
| 3812851 | 68305543 | 50479 | intron | G/A | G | 0.769 | 0.804 | 0.151 |
| 3812850 | 68305631 | 50567 | intron | A/G | A | 0.002 | 0.013 | 0.025 |
| 2325555 | 68306929 | 51865 | intron | A/G | G | 0.239 | 0.190 | 0.047 |
| 1535802 | 68313413 | 58349 | intragenic | C/G | G | 0.329 | 0.307 | 0.443 |
| | | | intron | | | 0.329 | 0.307 | 0.443 |
| | | | intragenic | | | 0.346 | 0.330 | 0.557 |
| 1535801 | 68313528 | 58464 | intragenic | A/T | A | 0.468 | 0.510 | 0.172 |
| | | | intron | | | 0.468 | 0.510 | 0.172 |
| 718569 | 68323615 | 68551 | intron | C/T | C | 0.638 | 0.676 | 0.188 |
| 2325556 | 68325483 | 70419 | intron | C/G | G | 0.823 | 0.810 | 0.590 |
| 2274086 | 68328078 | 73014 | intron | T/G | T | 0.529 | 0.562 | 0.270 |
| 1886235 | 68330306 | 75242 | intron | G/T | T | 0.832 | 0.828 | 0.860 |
| 1886234 | 68330569 | 75505 | intragenic | A/G | A | 0.473 | 0.506 | 0.273 |
| | | | intron | | | 0.473 | 0.506 | 0.273 |
| 2325558 | 68333131 | 78067 | intron | G/A | G | 0.664 | 0.670 | 0.825 |
| 2325559 | 68333329 | 78265 | intron | T/G | G | 0.070 | 0.033 | 0.006 |
| 2325560 | 68333354 | 78290 | intron | C/T | C | 0.694 | 0.716 | 0.430 |
| 3764134 | 68334020 | 78956 | coding- | A/C | A | 0.350 | 0.370 | 0.496 |
| | | | synon | | | | | |
| | | | reference | | | 0.350 | 0.370 | 0.496 |
| 3764133 | 68334260 | 79196 | intron | A/G | G | 0.772 | 0.718 | 0.038 |
| 2025426 | 68336950 | 81886 | intragenic | G/A | A | 0.575 | 0.527 | 0.110 |
| | | | intron | | | 0.575 | 0.527 | 0.110 |
| 2025425 | 68337463 | 82399 | intragenic | T/G | G | 0.746 | 0.737 | 0.745 |
| | | | intron | | | 0.746 | 0.737 | 0.745 |
| | | | intragenic | | | 0.744 | 0.746 | 0.950 |
| 1324059 | 68338444 | 83380 | intragenic | A/G | A | 0.712 | 0.720 | 0.776 |
| | | | intron | | | 0.712 | 0.720 | 0.776 |
| 2325561 | 68341709 | 86645 | intron | T/C | C | 0.310 | 0.298 | 0.668 |
| 2875666 | 68341768 | 86704 | intron | T/C | T | 0.175 | 0.199 | 0.314 |
| 1408248 | 68343198 | 88134 | intron | C/G | C | 0.290 | 0.338 | 0.085 |
| 1324058 | 68351480 | 96416 | intragenic | C/A | A | 0.716 | 0.663 | 0.057 |
| | | | intron | | | 0.716 | 0.663 | 0.057 |
| 1011059 | 68351493 | 96429 | intragenic | A/T | T | 0.148 | 0.107 | 0.038 |
| | | | intron | | | 0.148 | 0.107 | 0.038 |
| 1011058 | 68351599 | 96535 | intragenic | C/T | C | 0.759 | 0.836 | 0.002 |
| | | | intron | | | 0.759 | 0.836 | 0.002 |
| | | | intragenic | | | 0.754 | 0.833 | 0.002 |
| 2325563 | 68365984 | 110920 | intron | A/C | C | 0.353 | 0.340 | 0.645 |
| 2325564 | 68369181 | 114117 | intron | T/C | T | 0.645 | 0.660 | 0.595 |
| 879800 | 68372361 | 117297 | intron | C/T | T | 0.105 | 0.064 | 0.014 |
| 2325565 | 68372681 | 117617 | intron | C/T | C | 0.411 | 0.497 | 0.005 |
| 255595 | 68373934 | 118870 | intragenic | A/G | G | 0.694 | 0.630 | 0.024 |
| 2875667 | 68378804 | 123740 | intron | A/G | A | 0.177 | 0.196 | 0.412 |
| 2325566 | 68378856 | 123792 | intron | T/G | T | 0.208 | 0.233 | 0.326 |
| 2325567 | 68378940 | 123876 | intron | C/T | C | 0.264 | 0.306 | 0.121 |
| 2325568 | 68378944 | 123880 | intron | C/T | C | 0.974 | 0.992 | 0.024 |
| 1998572 | 68381749 | 126685 | intron | A/C | A | 0.268 | 0.279 | 0.676 |
| | | | mrna-utr | | | 0.268 | 0.279 | 0.676 |
| | | | unknown | | | 0.268 | 0.279 | 0.676 |
| 1998573 | 68381760 | 126696 | intron | A/C | A | 0.040 | 0.048 | 0.516 |
| | | | mrna-utr | | | 0.040 | 0.048 | 0.516 |
| | | | unknown | | | 0.040 | 0.048 | 0.516 |
| unknown | 68382054 | 126990 | intragenic | C/T | T | 0.715 | 0.714 | 0.961 |
| | | | intragenic | C/T | C | 0.703 | 0.722 | 0.506 |
| 1324061 | 68383003 | 127939 | intragenic | T/C | T | 0.401 | 0.402 | 0.964 |
| | | | intron | | | 0.401 | 0.402 | 0.964 |
| 2209726 | 68401210 | 146146 | intron | T/C | T | 0.200 | 0.225 | 0.302 |
| 2225100 | 68401376 | 146312 | intron | T/G | T | 0.170 | 0.211 | 0.079 |

[0273] The chromosome position is based on “build 31” of NCBI's GenBank. Some of the SNPs were allelotyped multiple times with different assays, e.g., using different PCR primers. Some of the SNPs have multiple annotations, therefore, there may be conflicting “sequence locations.” Those SNPs with allelotyping p-values of less than 0.04 are in bold text.

[0274] The full-length KLF12 gene consists of eight exons, while the truncated form consists of five exons. See Table 11:

TABLE 11
Full-Length and Truncated KLF12 Exons

| | | | | | | | SEQ ID | | |
|---|---|---|---|---|---|---|---|---|---|
| | | | | | | | NO: 1 | | |
| | SEQ ID NO: 1 | | NT_024524 | | | | Exon | NM_007249 | NM_016285 |
| Exon | Ensembl Build 31 | | NM_007249 (FL) | | NM_016285 (TR) | | length | Exon length | Exon length |
| 1 | 447728 | 447894 | 1 | 167 | 1 | 167 | 166 | 166 | 166 |
| 2 | 308979 | 309043 | 138853 | 138916 | 138853 | 138916 | 64 | 63 | 63 |
| 3 | 257970 | 258059 | 189836 | 189925 | 189836 | 189925 | 89 | 89 | 89 |
| 4 | 159816 | 160362 | 287533 | 288079 | 287533 | 288079 | 546 | 546 | 546 |
| 5 | 127141 | 127276 | 320619 | 320754 | 320619 | 321347 | 135 | 135 | 728 |
| 6 | 78927 | 78989 | 368906 | 368968 | 0 | 0 | 62 | 62 | 0 |
| 7 | 29357 | 29514 | 418381 | 418538 | 0 | 0 | 157 | 157 | 0 |
| 8 | 1 | 9660 | 438235 | 447894 | 0 | 0 | 9659 | 9659 | 0 |

[0275] In addition, the exons of KLF12 were sequenced using ABI's Dye-Terminator Cycle Sequencing. The sequencing of the amplified DNA was carried out on ABI 377 sequencers. The sequences of the amplification products were determined using automated dideoxy terminator sequencing reactions with a dye terminator cycle sequencing protocol. The sequence data were further evaluated to detect the presence of polymorphic variants within the amplified fragments. The polymorphism search was based on the presence of superimposed peaks in the electrophoresis pattern resulting from different bases occurring at the same position. The localization of the biallelic markers detected in the fragments of amplification are as shown below in Table 12:

TABLE 12

| Position in SEQ | | | Minor Allele |
|---|---|---|---|
| ID NO: 1 | Gene Position | Alleles | Frequency |
| 1 | Exon 7 | T/G | 0.10 |
| 1437 | Exon 7 | A/T | 0.05 |
| 1604 | Exon 7 | G/A | 0.10 |
| 2251 | Exon 7 | A/T | 0.05 |
| 2906 | Exon 7 | T/C | 0.20 |
| 2953 | Exon 7 | C/T | 0.20 |
| 3131 | Exon 7 | G/A | 0.05 |
| 3133 | Exon 7 | A/A | 0.00 |
| 3238 | Exon 7 | T/G | 0.20 |
| 3594 | Exon 7 | A/G | 0.10 |
| 4312 | Exon 7 | C/G | 0.11 |
| 4854 | Exon 7 | T/G | 0.05 |
| 5100 | Exon 7 | G/A | 0.11 |
| 5351 | Exon 7 | A/G | 0.11 |
| 5355 | Exon 7 | G/A | 0.11 |
| 78956 | Exon 5 | G/T | 0.50 |
| 96535 | Intron 4 | C/T | Incident SNP |
| 126990 | Intron 4 | T/C | 0.19 |
| 127370 | Intron 3 | A/G | 0.05 |
| 258062 | Exon 2 | G/A | 0.40 |
| 309011 | Exon 1; ATG | | |
| 309745 | Promoter | G/A | 0.14 |
| 310144 | Promoter | T/C | 0.17 |
| 310238 | Promoter | T/C | 0.11 |
| 310144 | Promoter | T/C | 0.17 |
| 310238 | Promoter | T/C | 0.11 |

[0276] The minor allele is set forth as the second allele in column four, “Alleles”, of Table 12.

[0277] Four of the SNPs set forth in Table 12 were genotyped as described in Example 2 using the primers and probes set forth in Tables 13 and 14. None of the four SNPs genotyped showed a significant association with breat cancer. See Table 15.

TABLE 13
PCR Primers

| Reference | Forward | Reverse |
|---|---|---|
| SNP ID | PCR primer | PCR primer |
| 259485 | ACGTTGGATGGCTGAATCTTTCTCTCTCCC | ACGTTGGATGTGTTTTGACTCTGACTGCCG |
| 128413 | ACGTTGGATGAAACACTCCATTCTCTGCCC | ACGTTGGATGTGTGAACTGGCACGAATGTC |
| 311168 | ACGTTGGATGAGGACCATTAGGATATCACC | ACGTTGGATGTCCAAATAGGGCAAATGGTC |
| 80379 | ACGTTGGATGAGACTGTATACTCACCAAGG | ACGTTGGATGTCTGTCTACAGGGTACATCC |

[0278] TABLE 14

| Reference | Extend | Term |
|---|---|---|
| SNP ID | Probe | Mix |
| 259485 | TCTCTCTCCCTTCTATTCT | ACG |
| 128413 | CTCCATTCTCTGCCCTAATCTC | ACG |
| 311168 | ATTGGGCTGGGGAGTTCT | ACT |
| 80379 | ACTTTTGATTATTCATTCGATT | ACT |

[0279] TABLE 15

| Reference | AF | AF | |
|---|---|---|---|
| SNP ID | F case | F control | p-value |
| 259485 | G = 0.646 | G = 0.622 | 0.402 |
| | A = 0.354 | A = 0.378 | |
| 128413 | T = 0.761 | T = 0.778 | 0.522 |
| | C = 0.239 | C = 0.222 | |
| 311168 | Not Polymorphic | | |
| 80379 | T = 0.554 | T = 0.523 | 0.313 |
| | G = 0.446 | G = 0.477 | |

### Example 4

### Screening Assay to Detect Inhibitors of KLF12

[0280] The following is an exemplary assay for finding inhibitors of KLF12. There are many assays known in the art for detecting inhibitors. See, e.g., Roth C et al. Genomics 2000 Feb. 1;63(3):384-90. Cells are transfected, transiently or often stably with the reporter construct described in Roth et al. Genomics 2000 Feb. 1;63(3):384-90. The cells often are chosen for minimal expression of endogenous KLF12, so that it can be externally introduced. Cells expressing the construct are co-transfected with a KLF12 expression vector or with vector lacking the KLF12 sequence (control). Both sets of cells are treated with the test compound and reporter gene activity is measured. Active compounds are selected based on their ability to prevent inhibition of the reporter gene expression when co-expressed with KLF12 and to have minimal effect on the control cells.

### Example 5

### KLF12 Expression Profile

[0281] Breast cells were profiled for AP-2a expression to determine if an inverse correlation exists between KLF12 and AP-2a levels. This relationship was seen for cells that do not express significant levels of the KLF12 truncated isoform (e.g., MCF-7, T-47D, Hbl-100). See FIG. 4. This result is consistent with the reported role of KLF12 as a transcriptional repressor of AP-2a. However, for breast cell lines MDA-MB-231 and MDA-MB-436, high KLF12 levels do not correlate with low AP-2a levels.

[0282] FIG. 4 shows the cumulative mRNA expression profile of the five breast cell lines (MCF-7, T47D, Hbl-100, MDA-MB-231 and MDA-MB436) from the 56-panel compared to normal breast tissue. The 56-panel consists of a subset of 56 cells that represent a plurality of cells from different human tissue types. KLF12 TR and AP-2a RT-PCR were done in a semi-automated mode in a volume of 10 μl while the KLF12 (both) RT-PCR was done manually in a total volume of 25 μl using Hotstar Taq™ from Qiagen, Inc. Any well-known expression profiling technique may be used.

### Example 6

### Inhibition of KLF12 Gene Expression by Transfection of Specific siRNAs

[0283] RNAi-based gene inhibition was selected as a rapid way to inhibit expression of KLF12 in cultured cells. SiRNA reagents were selectively designed to target truncated isoform of KLF12 (TR), or both isoforms. Algorithms useful for designing siRNA molecules specific for the KLF12 targets are disclosed at the http address www.dhramacon.com. siRNA molecules up to 21 nucleotides in length were utilized. Table 16 summarizes the features of two duplexes that were ordered from Dharmacon Research, Inc., and subsequently used in the assays described herein. A non-homologous siRNA reagent was used as a negative control.

TABLE 16
Duplex 21-mer siRNAs used for cell transfection

| | | | |
|---|---|---|---|
| | | | SEQ ID |
| siRNA | siRNA Target | Sequence Specificity | NO: |

| | | |
|---|---|---|
| siKLF1 | Targets both | AAGGGUCUCCAAACGUCCACA |
| | forms; exon2/3 | |
| | boundary | |
| siKLF4 | Targets trun- | AAGUAUCACAUUCACAGGAUG |
| | cated form | |
| | only; 3′ UTR | |
| siKLF1 | Non-homologous | AAUGCCACAGUACACCAGUCG |
| scrm | scrambled con- | |
| | trol | |

[0284] The siRNAs were transfected in cell lines MCF-7 and T-47D using Lipofectamine™ 2000 reagent from Invitrogen, Corp. 2.5 μg or 5.0 μg of siRNA was mixed with 6.25 μl or 12.5 μl lipofectamine, respectively, and the mixture was added to cells grown in 6-well plates. Their inhibitory effects on KLF12 gene expression were confirmed by precision expression analysis by MassARRAY (quantitativeRT-PCR hME), which was performed on RNA prepared from the transfected cells. See Chunming D. and Cantor C. PNAS 100(6):3059-3064 (2003). RNA was extracted from cells two days after transfection. RNA was extracted with Trizole reagent as recommended by the manufacturer (Invitrogen, Corp.) followed by cDNA synthesis using SuperScript™ reverse transcriptase. The level of KLF12 transcript during this exact experiment is shown in FIG. 5. Both siKLF1 and siKLF4 suppressed the levels of KLF12 transcript as compared to an siLamin control. Low levels of lipid control are non-characteristic. Results of the qRT-PCR-hME assay for KLF12 demonstrated higher that usual variability between experiments due to very low expression levels of KLF12.

[0285] The specificity of the RNAi effect was confirmed by transfecting siRNA with a sequence corresponding to a randomly scrambled sequence for siKLF1 (siKLF1 scrm). FIG. 11 shows that, like the other controls (siGL2 and lipid), siKLF1 scrm did not inhibit proliferation of MCF-7 cells, while siKLF1 completely inhibited proliferation as described in Example 7 below.

### Example 7

### Cell Proliferation

[0286] The siRNAs from Example 6 were transfected in cell lines grown in 6-well plates. Cells were trypsinized on the following day and distributed into 96-well plates. Wst-1 reagent was added on the indicated days and the absorbance at 650 nm and 450 nm was measured. The difference in absorbance between these 2 wavelengths is an indication of the metabolic activity in each well that was measured. Metabolic activity is directly proportional to the number of cells in each well.

[0287] Suppression of KLF12 mRNA levels correlated with decreased cell proliferation. The siRNA duplex siKLF1 suppressed proliferation of six non-related breast cancer cell lines (MCF-7, T-47D, Hbl-100, ZR-75-1, Hs 578, MDA-MB-435), while siRNA probe (siKLF4) was effective in some cell lines (MCF-7). See FIGS. 6, 7 and 8. This effect was confirmed by two different assays and by changes in cell morphology, as described herein.

[0288] A direct DNA measurement assay (see, e.g., CyQuant® from Molecular Probes, Inc.) was also employed in several experiments. In this experiment siKLF1 and siKLF4 both inhibited proliferation of T-47D cells 7 days after siRNA transfection. See FIG. 9. This confirms the results seen in the other experiment shown in FIG. 8 on day 7.

[0289] These results clearly implicate KFL12 gene expression in the regulation of proliferation of human breast cancer cells. Specifically, siKLF1 can potently suppress proliferation of at least five breast cancer lines (MCF-7, T-47D, ZR-75-1, Hs 578, MDA-MB-435), regardless of what isoform (FL or TR) is targeted. siKLF1 is also active against melanoma and prostate cancer lines, as described herein. In cases where only partial inhibition is achieved, a cocktail of siRNAs and/or repeated transfection may aid in completely stopping cell division.

[0290] Cell Morphology

[0291] Examination of cells by phase contrast microscopy suggests that cells that are affected by the siKLFs have started to assume an apoptotic morphology. See FIG. 10. The morphology of cells is consistent with the inhibitory effect of two siRNAs, siKLF1 and siKLF4, on proliferation. The cells are smaller and more rounded than the controls, siLucCy3 or siLaminA/C. This phenomenon was repeatedly observed. Staining of cells with annexin-FITC and propidium iodide confirmed that the cells are dying by apoptosis. See FIG. 12.

[0292] Other Cancer Cell Lines

[0293] In addition, it was shown that growth of at least two other non-breast tumor cell lines was suppressed via inhibition of KLF12 expression. siRNAs were tested against KLF12 in melanoma and prostate cancer cell lines using the cell proliferation assay described herein. siKLF1 was effective in decreasing proliferation of melanoma and prostate cancer lines: A2058 (SQC0143) and PC3 (SQC0065), respectively. See FIGS. 11A and 11B. It should be noted that repeated dosing or a cocktail of different siRNAs against KLF12 may be required for melanoma since the surviving cells resume at the same proliferative rate as the lipid control by day 6. This may be due to higher KLF12 level in these cells.

### Example 8

### In Vitro Production of KLF12 Polypeptides

[0294] KLF12 cDNA is cloned into a p1VEX 2.3-MCS vector (Roche Biochem) using a directional cloning method. A KLF12 cDNA insert is prepared using PCR with forward and reverse primers having 5′ restriction site tags (in frame) and 5-6 additional nucleotides in addition to 3′ gene-specific portions, the latter of which is often about twenty to about twenty-five base pairs in length. A Sal I restriction site is introduced by the forward primer and a Sma I restriction site is introduced by the reverse primer. The ends of KLF12 PCR products are cut with the corresponding restriction enzymes (i.e., Sal I and Sma I) and the products are gel-purified. The p1VEX 2.3-MCS vector is linearized using the same restriction enzymes, and the fragment with the correct sized fragment is isolated by gel-purification. Purified KLF12 PCR product is ligated into the linearized pIVEX 2.3-MCS vector and E. coli cells transformed for plasmid amplification. The newly constructed expression vector is verified by restriction mapping and used for protein production.

[0295] E. coli lysate is reconstituted with 0.25 ml of Reconstitution Buffer, the Reaction Mix is reconstituted with 0.8 ml of Reconstitution Buffer; the Feeding Mix is reconstituted with 10.5 ml of Reconstitution Buffer; and the Energy Mix is reconstituted with 0.6 ml of Reconstitution Buffer. 0.5 ml of the Energy Mix was added to the Feeding Mix to obtain the Feeding Solution. 0.75 ml of Reaction Mix, 50 μl of Energy Mix, and 10 μg of the KLF12 template DNA is added to the E. coli lysate.

[0296] Using the reaction device (Roche Biochem), 1 ml of the Reaction Solution is loaded into the reaction compartment. The reaction device is turned upside-down and 10 ml of the Feeding Solution is loaded into the feeding compartment. All lids are closed and the reaction device is loaded into the RTS500 instrument. The instrument is run at 30° C. for 24 hours with a stir bar speed of 150 rpm. The p1VEX 2.3 MCS vector includes a nucleotide sequence that encodes six consecutive histidine amino acids on the C-terminal end of the KLF12 polypeptide for the purpose of protein purification. KLF12 polypeptide is purified by contacting the contents of reaction device with resin modified with Ni²⁺ ions. KLF12 polypeptide is eluted from the resin with a solution containing free Ni²⁺ ions.

### Example 9

### Cellular Production of KLF12 Polypeptides

[0297] KLF12 nucleic acids are cloned into DNA plasmids having phage recombination cites and KLF12 polypeptides and polypeptide variants are expressed therefrom in a variety of host cells. Alpha-phage genomic DNA contains short sequences known as attP sites, and E. coli genomic DNA contains unique, short sequences known as attB sites. These regions share homology, allowing for integration of phage DNA into E. coli via directional, site-specific recombination using the phage protein Int and the E. coli protein IHF. Integration produces two new att sites, L and R, which flank the inserted prophage DNA. Phage excision from E. coli genomic DNA can also be accomplished using these two proteins with the addition of a second phage protein, Xis. DNA vectors have been produced where the integration/excision process is modified to allow for the directional integration or excision of a target DNA fragment into a backbone vector in a rapid in vitro reaction (Gateway™ Technology (Invitrogen, Corp.)).

[0298] A first step is to transfer the KLF12 nucleic acid insert into a shuttle vector that contains attL sites surrounding the negative selection gene, ccdB (e.g. pENTER vector, Invitrogen, Corp.). This transfer process is accomplished by digesting the KLF12 nucleic acid from a DNA vector used for sequencing, and to ligate it into the multicloning site of the shuttle vector, which will place it between the two attL sites while removing the negative selection gene ccdB. A second method is to amplify the KLF12 nucleic acid by the polymerase chain reaction (PCR) with primers containing attB sites. The amplified fragment then is integrated into the shuttle vector using Int and IHF. A third method is to utilize a topoisomerase-mediated process, in which the KLF12 nucleic acid is amplified via PCR using gene-specific primers with the 5′ upstream primer containing an additional CACC sequence (e.g., TOPO® expression kit (Invitrogen, Corp.)). In conjunction with Topoisomerase I, the PCR amplified fragment can be cloned into the shuttle vector via the attL sites in the correct orientation.

[0299] Once the KLF12 nucleic acid is transferred into the shuttle vector, it can be cloned into an expression vector having attR sites. Several vectors containing attR sites for expression of KLF12 polypeptide as a native polypeptide, N-fusion polypeptide, and C-fusion polypeptides are commercially available (e.g., pDEST (Invitrogen, Corp.)), and any vector can be converted into an expression vector for receiving a KLF12 nucleic acid from the shuttle vector by introducing an insert having an attR site flanked by an antibiotic resistant gene for selection using the standard methods described above. Transfer of the KLF12 nucleic acid from the shuttle vector is accomplished by directional recombination using Int, IHF, and Xis (LR clonase). Then the desired sequence can be transferred to an expression vector by carrying out a one hour incubation at room temperature with Int, IHF, and Xis, a ten minute incubation at 37° C. with proteinase K, transforming bacteria and allowing expression for one hour, and then plating on selective media. Generally, 90% cloning efficiency is achieved by this method. Examples of expression vectors are pDEST 14 bacterial expression vector with att7 promoter, pDEST 15 bacterial expression vector with a T7 promoter and a N-terminal GST tag, pDEST 17 bacterial vector with a T7 promoter and a N-terminal polyhistidine affinity tag, and pDEST 12.2 mammalian expression vector with a CMV promoter and neo resistance gene. These expression vectors or others like them are transformed or transfected into cells for expression of the KLF12 polypeptide or polypeptide variants. These expression vectors are often transfected, for example, into murine-transfonned a adipocyte cell line 3T3-L1, (ATCC), human embryonic kidney cell line 293, and rat cardiomyocyte cell line H9C2.

[0300] Modifications can be made to the foregoing without departing from the basic aspects of the invention. Although the invention has been described in substantial detail with reference to one or more specific embodiments, those of skill in the art will recognize that changes can be made to the embodiments specifically disclosed in this application, yet these modifications and improvements are within the scope and spirit of the invention, as set forth in the claims which follow. All publications or patent documents cited in this specification are incorporated herein by reference as if each such publication or document was specifically and individually indicated to be incorporated herein by reference.

[0301] Citation of the above publications or documents is not intended as an admission that any of the foregoing is pertinent prior art, nor does it constitute any admission as to the contents or date of these publications or documents. U.S. patents and other publications referenced herein are hereby incorporated by reference.

1. A method for identifying a subject at risk of breast cancer, which comprises detecting the presence or absence of one or more polymorphic variations associated with breast cancer in a nucleic acid sample from a subject, wherein the one or more polymorphic variations are detected in a nucleotide sequence selected from the group consisting of:
(a) a nucleotide sequence in FIGS. 1A-1YYYY or FIGS. 2A-2B;
(b) a nucleotide sequence which encodes a polypeptide encoded by a nucleotide sequence in FIGS. 1A-1YYYY or FIGS. 2A-2B;
(c) a nucleotide sequence which encodes a polypeptide that is 90% or more identical to the amino acid sequence encoded by a nucleotide sequence in FIGS. 1A-1YYYY or FIGS. 2A-2B;
(d) a fragment of a nucleotide sequence of (a), (b), or (c);
whereby the presence of the polymorphic variation is indicative of the subject being at risk of breast cancer.

2. The method of claim 1, which further comprises obtaining the nucleic acid sample from the subject.

3. The method of claim 1, wherein the one or more polymorphic variations are detected at one or more positions in SEQ ID NO: 1 is selected from the group consisting of 50479, 50567, 51865, 58349, 58464, 68551, 70419, 73014, 75242, 75505, 78067, 78265, 78290, 78956, 79196, 81886, 82399, 83380, 86645, 86704, 88134, 96416, 96429, 96535, 110920, 14117, 117297, 117617, 118870, 123740, 123792, 123876, 123880, 126685, 126696, 126990, 127939, 146146, and 146312.

4. The method of claim 1, wherein the one or more polymorphic variations are detected within a region spanning positions 78265 to 123880, spanning positions 78265 to 96535, or spanning positions 117297 to 123880 in SEQ ID NO: 1.

5. The method of claim 3, wherein a polymorphic variation is detected at position 78265 in SEQ ID NO: 1.

6. The method of claim 3, wherein a polymorphic variation is detected at position 96535 in SEQ ID NO: 1.

7. The method of claim 3, wherein a polymorphic variation is detected at position 117617 in SEQ ID NO: 1.

8. The method of claim 1, wherein the one or more polymorphic variations are detected at one or more positions in linkage disequilibrium with one or more positions in SEQ ID NO: 1 selected from the group consisting of 50479, 50567, 51865, 58349, 58464, 68551, 70419, 73014, 75242, 75505, 78067, 78265, 78290, 78956, 79196, 81886, 82399, 83380, 86645, 86704, 88134, 96416, 96429, 96535, 110920, 14117, 117297, 117617, 118870, 123740, 123792, 123876, 123880, 126685, 126696, 126990, 127939, 146146, and 146312.

9. The method of claim 1, wherein detecting the presence or absence of the one or more polymorphic variations comprises:
hybridizing an oligonucleotide to the nucleic acid sample, wherein the oligonucleotide is complementary to a nucleotide sequence in the nucleic acid and hybridizes to a region adjacent to the polymorphic variation;
extending the oligonucleotide in the presence of one or more nucleotides, yielding extension products; and
detecting the presence or absence of a polymorphic variation in the extension products.

10. The method of claim 1, wherein the subject is a human.

11. A method for identifying a polymorphic variation associated with breast cancer proximal to an incident polymorphic variation associated with breast cancer, which comprises:
identifying a polymorphic variation proximal to the incident polymorphic variation associated with breast cancer, wherein the polymorphic variation is detected in a nucleotide sequence selected from the group consisting of:
(a) a nucleotide sequence in FIGS. 1A-1YYYY or FIGS. 2A-2B;
(b) a nucleotide sequence which encodes a polypeptide encoded by a nucleotide sequence in FIGS. 1A-1YYYY or FIGS. 2A-2B;
(c) a nucleotide sequence which encodes a polypeptide that is 90% or more identical to the amino acid sequence encoded by a nucleotide sequence in FIGS. 1A-1YYYY or FIGS. 2A-2B;
(d) a fragment of a nucleotide sequence of (a), (b), or (c) comprising the polymorphic variation;
determining the presence or absence of an association of the proximal polymorphic variant with breast cancer.

12. The method of claim 11, wherein the incident polymorphic variation is at a position in SEQ ID NO: 1 selected from the group consisting of 50479, 50567, 51865, 58349, 58464, 68551, 70419, 73014, 75242, 75505, 78067, 78265, 78290, 78956, 79196, 81886, 82399, 83380, 86645, 86704, 88134, 96416, 96429, 96535, 110920, 14117, 117297, 117617, 118870, 123740, 123792, 123876, 123880, 126685, 126696, 126990, 127939, 146146, and 146312.

13. The method of claim 1, wherein the incident polymorphic variation is within a region spanning positions 78265 to 123880, spanning positions 78265 to 96535, or spanning positions 117297 to 123880 in SEQ ID NO: 1.

14. The method of claim 11, wherein the proximal polymorphic variation is within a region between about 5 kb 5′ of the incident polymorphic variation and about 5 kb 3′ of the incident polymorphic variation.

15. The method of claim 11, which further comprises determining whether the proximal polymorphic variation is in linkage disequilibrium with the incident polymorphic variation.

16. The method of claim 11, which further comprises identifying a second polymorphic variation proximal to the identified proximal polymorphic variation associated with breast cancer and determining if the second proximal polymorphic variation is associated with breast cancer.

17. The method of claim 16, wherein the second proximal polymorphic variant is within a region between about 5 kb 5′ of the incident polymorphic variation and about 5 kb 3′ of the proximal polymorphic variation associated with breast cancer.

18. An isolated nucleic acid comprising a nucleotide sequence selected from the group consisting of:
(a) a nucleotide sequence in FIGS. 1A-1YYYY or FIGS. 2A-2B;
(b) a nucleotide sequence which encodes a polypeptide encoded by a nucleotide sequence in FIGS. 1A-1YYYY or FIGS. 2A-2B;
(c) a nucleotide sequence which encodes a polypeptide that is 90% or more identical to the amino acid sequence encoded by a nucleotide sequence in FIGS. 1A-1YYYY or FIGS. 2A-2B;
(d) a fragment of a nucleotide sequence of (a), (b), or (c); and
(e) a nucleotide sequence complementary to the nucleotide sequences of (a), (b), (c), or (d);
wherein the nucleotide sequence comprises a nucleotide at a position in FIGS. 1A-1YYYY associated with breast cancer selected from the group consisting of a guanine at position 78265, a guanine at position 79169, a thymine at position 96429, a cytosine at position 96535, a thymine at position 117297, a cytosine at position 117617, a guanine at position 118870, and a cytosine at position 123880.

19. An oligonucleotide comprising a nucleotide sequence complementary to a portion of the nucleotide sequence of (a), (b), (c), or (d) in claim 18, wherein the 3′ end of the oligonucleotide is adjacent to a polymorphic variation associated with breast cancer.

20. A microarray comprising an isolated nucleic acid of claim 18 linked to a solid support.

21. An isolated polypeptide encoded by the isolated nucleic acid sequence of claim 18.

22. A method for identifying a candidate molecule that modulates cell proliferation, which comprises:
(a) introducing a test molecule to a system which comprises a nucleic acid comprising a nucleotide sequence selected from the group consisting of:
(i) a nucleotide sequence in FIGS. 1A-1YYYY or FIGS. 2A-2B;
(ii) a nucleotide sequence which encodes a polypeptide encoded by a nucleotide sequence in FIGS. 1A-1YYYY or FIGS. 2A-2B;
(iii) a nucleotide sequence which encodes a polypeptide that is 90% or more identical to the amino acid sequence encoded by a nucleotide sequence in FIGS. 1A-1YYYY or FIGS. 2A-2B;
(iv) a fragment of a nucleotide sequence of (i), (ii), or (iii); or introducing a test molecule to a system which comprises a protein encoded by a nucleotide sequence of (i), (ii), (iii), or (iv); and
(b) determining the presence or absence of an interaction between the test molecule and the nucleic acid or protein,
whereby the presence of an interaction between the test molecule and the nucleic acid or protein identifies the test molecule as a candidate molecule that modulates cell proliferation.

23. The method of claim 22, wherein the system is an animal.

24. The method of claim 22, wherein the system is a cell.

25. The method of claim 22, wherein the nucleotide sequence comprises one or more polymorphic variations associated with breast cancer.

26. The method of claim 25, wherein the one or more polymorphic variations associated with breast cancer are at one or more positions in SEQ ID NO: 1 is selected from the group consisting of 50479, 50567, 51865, 58349, 58464, 68551, 70419, 73014, 75242, 75505, 78067, 78265, 78290, 78956, 79196, 81886, 82399, 83380, 86645, 86704, 88134, 96416, 96429, 96535, 110920, 14117, 117297, 117617, 118870, 123740, 123792, 123876, 123880, 126685, 126696, 126990, 127939, 146146, and 146312.

27. The method of claim 25, wherein the one or more polymorphic variations associated with breast cancer are in a region spanning positions 78265 to 123880, spanning positions 78265 to 96535, or spanning positions 117297 to 123880 in SEQ ID NO: 1.

28. A method for treating breast cancer in a subject, which comprises administering a candidate molecule identified by the method of claim 23 to a subject in need thereof, whereby the candidate molecule treats breast cancer in the subject.

29. A method for identifying a candidate therapeutic for treating breast cancer, which comprises:
(a) introducing a test molecule to a system which comprises a nucleic acid comprising a nucleotide sequence selected from the group consisting of:
(i) a nucleotide sequence in FIGS. 1A-1YYYY or FIGS. 2A-2B;
(ii) a nucleotide sequence which encodes a polypeptide encoded by a nucleotide sequence in FIGS. 1A-1YYYY or FIGS. 2A-2B;
(iii) a nucleotide sequence which encodes a polypeptide that is 90% or more identical to the amino acid sequence encoded by a nucleotide sequence in FIGS. 1A-1YYYY or FIGS. 2A-2B;
(iv) a fragment of a nucleotide sequence of (i), (ii), or (iii); or introducing a test molecule to a system which comprises a protein encoded by a nucleotide sequence of (i), (ii), (iii), or (iv); and
(b) determining the presence or absence of an interaction between the test molecule and the nucleic acid or protein,
whereby the presence of an interaction between the test molecule and the nucleic acid or protein identifies the test molecule as a candidate therapeutic for treating breast cancer.

30. A method for treating breast cancer in a subject, which comprises contacting one or more cells of a subject in need thereof with a nucleic acid, wherein the nucleic acid comprises a nucleotide sequence selected from the group consisting of:
(a) a nucleotide sequence FIGS. 1A-1YYYY or FIGS. 2A-2B;
(b) a nucleotide sequence which encodes a polypeptide encoded by a nucleotide sequence in FIGS. 1A-1YYYY or FIGS. 2A-2B;
(c) a nucleotide sequence which encodes a polypeptide that is 90% or more identical to the amino acid sequence encoded by a nucleotide sequence in FIGS. 1A-1YYYY or FIGS. 2A-2B;
(d) a fragment of a nucleotide sequence of (a), (b), or (c); and
(e) a nucleotide sequence complementary to the nucleotide sequences of (a), (b), (c), or (d);
whereby contacting the one or more cells of the subject with the nucleic acid treats breast cancer in the subject.

31. The method of claim 30, wherein the nucleic acid is RNA or PNA.

32. The method of claim 31, wherein the nucleic acid is duplex RNA.

33. The method of claim 32, wherein a strand of the duplex RNA comprises a nucleotide sequence selected from the group consisting of

| | |
|---|---|
| AAGGGUCUCCAAACGUCCACA; | (SEQ ID NO: 138) |
| AAGUAUCACAUUCACAGGAUG | (SEQ ID NO: 139) |
| and | |
| AAUGCCACAGUACACCAGUCG. | (SEQ ID NO: 140) |

34. A method for treating breast cancer in a subject, which comprises contacting one or more cells of a subject in need thereof with a protein, wherein the protein is encoded by a nucleotide sequence which comprises a polynucleotide sequence selected from the group consisting of:
(a) a nucleotide sequence in FIGS. 1A-1YYYY or FIGS. 2A-2B;
(b) a nucleotide sequence which encodes a polypeptide encoded by a nucleotide sequence in FIGS. 1A-1YYYY or FIGS. 2A-2B;
(c) a nucleotide sequence which encodes a polypeptide that is 90% or more identical to the amino acid sequence encoded by a nucleotide sequence in FIGS. 1A-1YYYY or FIGS. 2A-2B;
(d) a fragment of a nucleotide sequence of (a), (b), or (c);
whereby contacting the one or more cells of the subject with the protein treats breast cancer in the subject.

35. A method for treating breast cancer in a subject, which comprises:
detecting the presence or absence of one or more polymorphic variations associated with breast cancer in a nucleic acid sample from a subject, wherein the one or more polymorphic variation are detected in a nucleotide sequence selected from the group consisting of:
(a) a nucleotide sequence in FIGS. 1A-1YYYY or FIGS. 2A-2B;
(b) a nucleotide sequence which encodes a polypeptide encoded by a nucleotide sequence in FIGS. 1A-1YYYY or FIGS. 2A-2B;
(c) a nucleotide sequence which encodes a polypeptide that is 90% or more identical to the amino acid sequence encoded by a nucleotide sequence in FIGS. 1A-1YYYY or FIGS. 2A-2B;
(d) a fragment of a nucleotide sequence of (a), (b), or (c) comprising the polymorphic variation; and
administering a breast cancer treatment to a subject in need thereof based upon the presence or absence of the one or more polymorphic variations in the nucleic acid sample.

36. The method of claim 35, wherein the one or more polymorphic variations are at one or more positions in SEQ ID NO: 1 selected from the group consisting of 50479, 50567, 51865, 58349, 58464, 68551, 70419, 73014, 75242, 75505, 78067, 78265, 78290, 78956, 79196, 81886, 82399, 83380, 86645, 86704, 88134, 96416, 96429, 96535, 110920, 14117, 117297, 117617, 118870, 123740, 123792, 123876, 123880, 126685, 126696, 126990, 127939, 146146, and 146312.

37. The method of claim 36, wherein the one or more polymorphic variations are in a region spanning positions 78265 to 123880, spanning positions 78265 to 96535, or spanning positions 117297 to 123880 in SEQ ID NO: 1.

38. The method of claim 35, which further comprises extracting and analyzing a tissue biopsy sample from the subject.

39. The method of claim 35, wherein the treatment is chemotherapy, surgery, radiation therapy, and combinations of the foregoing.

40. The method of claim 39, wherein the chemotherapy is selected from the group consisting of cyclophosphamide (Cytoxan), methotrexate (Amethopterin, Mexate, Folex), fluorouracil (Fluorouracil, 5-Fu, Adrucil), cyclophosphamide, doxorubicin (Adriamycin), and combinations of the foregoing.

41. The method of claim 40, wherein the combinations are selected from the group consisting of cyclophosphamide (Cytoxan), methotrexate (Amethopterin, Mexate, Folex), and fluorouracil (Fluorouracil, 5-Fu, Adrucil); cyclophosphamide, doxorubicin (Adriamycin), and fluorouracil; and doxorubicin and cyclophosphamide.

42. A method for detecting or preventing breast cancer in a subject, which comprises:
detecting the presence or absence of one or more polymorphic variations associated with breast cancer in a nucleic acid sample from a subject, wherein the polymorphic variation is detected in a nucleotide sequence selected from the group consisting of:
(a) a nucleotide sequence in FIGS. 1A-1YYYY or FIGS. 2A-2B;
(b) a nucleotide sequence which encodes a polypeptide encoded by a nucleotide sequence in FIGS. 1A-1YYYY or FIGS. 2A-2B;
(c) a nucleotide sequence which encodes a polypeptide that is 90% or more identical to the amino acid sequence encoded by a nucleotide sequence in FIGS. 1A-1YYYY or FIGS. 2A-2B;
(d) a fragment of a nucleotide sequence of (a), (b), or (c) comprising the polymorphic variation; and
administering a breast cancer preventative or detection procedure to a subject in need thereof based upon the presence or absence of the one or more polymorphic variations in the nucleic acid sample.

43. The method of claim 42, wherein the one or more polymorphic variations are at one or more positions in SEQ ID NO: 1 is selected from the group consisting of 50479, 50567, 51865, 58349, 58464, 68551, 70419, 73014, 75242, 75505, 78067, 78265, 78290, 78956, 79196, 81886, 82399, 83380, 86645, 86704, 88134, 96416, 96429, 96535, 110920, 14117, 117297, 117617, 118870, 123740, 123792, 123876, 123880, 126685, 126696, 126990, 127939, 146146, and 146312.

44. The method of claim 43, wherein the one or more polymorphic variations are in a region spanning positions 78265 to 123880, spanning positions 78265 to 96535, or spanning positions 117297 to 123880 in SEQ ID NO: 1.

45. The method of claim 42, wherein the breast cancer detection procedure is selected from the group consisting of a mammography, an early mammography program, a frequent mammography program, a biopsy procedure, a breast biopsy and biopsy from another tissue, a breast ultrasound and optionally ultrasound analysis of another tissue, breast magnetic resonance imaging (MRI) and optionally MRI analysis of another tissue, electrical impedance (T-scan) analysis of breast and optionally of another tissue, ductal lavage, nuclear medicine analysis (e.g., scintimammography), BRCA1 and/or BRCA2 sequence analysis results, thermal imaging of the breast and optionally of another tissue, and a combination of the foregoing.

46. The method of claim 42, wherein the breast cancer preventative procedure is selected from the group consisting of one or more selective hormone receptor modulators, one or more compositions that prevent production of hormones, one or more hormonal treatments, one or more biologic response modifiers, surgery, and drugs that delay or halt metastasis.

47. The method of claim 46, wherein the selective hormone receptor modulator is selected from the group consisting of tamoxifen, reloxifene, and toremifene; the composition that prevents production of hormones is an aramotase inhibitor selected from the group consisting of exemestane, letrozole, anastrozol, groserelin, and megestrol; the hormonal treatment is selected from the group consisting of goserelin acetate and fulvestrant; the biologic response modifier is an antibody that specifically binds herceptin/HER2; the surgery is selected from the group consisting of lumpectomy and mastectomy; and the drug that delays or halts metastasis is pamidronate disodium.

48. A method of targeting information for preventing or treating breast cancer to a subject in need thereof, which comprises:
detecting the presence or absence of one or more polymorphic variations associated with breast cancer in a nucleic acid sample from a subject, wherein the polymorphic variation is detected in a nucleotide sequence selected from the group consisting of:
(a) a nucleotide sequence in FIGS. 1A-1YYYY or FIGS. 2A-2B;
(b) a nucleotide sequence which encodes a polypeptide encoded by a nucleotide sequence in FIGS. 1A-1YYYY or FIGS. 2A-2B;
(c) a nucleotide sequence which encodes a polypeptide that is 90% or more identical to the amino acid sequence encoded by a nucleotide sequence in FIGS. 1A-1YYYY or FIGS. 2A-2B;
(d) a fragment of a nucleotide sequence of (a), (b), or (c) comprising the polymorphic variation; and
directing information for preventing or treating breast cancer to a subject in need thereof based upon the presence or absence of the one or more polymorphic variations in the nucleic acid sample.

49. The method of claim 48, wherein the one or more polymorphic variations are at one or more positions in SEQ ID NO: 1 is selected from the group consisting of 50479, 50567, 51865, 58349, 58464, 68551, 70419, 73014, 75242, 75505, 78067, 78265, 78290, 78956, 79196, 81886, 82399, 83380, 86645, 86704, 88134, 96416, 96429, 96535, 110920, 14117, 117297, 117617, 118870, 123740, 123792, 123876, 123880, 126685, 126696, 126990, 127939, 146146, and 146312.

50. The method of claim 48, wherein the one or more polymorphic variations are in a region spanning positions 78265 to 123880, spanning positions 78265 to 96535, or spanning positions 117297 to 123880 in SEQ ID NO: 1.

51. The method of claim 48, wherein the information comprises a description of a breast cancer detection procedure, a chemotherapeutic treatment, a surgical treatment, a radiation treatment, a preventative treatment of breast cancer, and combinations of the foregoing.

52. A composition comprising a breast cancer cell and an antibody that specifically binds to a protein, polypeptide or peptide encoded by a nucleotide sequence identical to or 90% or more identical to a nucleotide sequence in FIGS. 1A-1YYYY or FIGS. 2A-2B.

53. A composition comprising a breast cancer cell and a RNA, DNA, PNA or ribozyme molecule comprising a nucleotide sequence identical to or 90% or more identical to a portion of a nucleotide sequence in FIGS. 1A-1YYYY or FIGS. 2A-2B.

54. The composition of claim 53, wherein the RNA molecule is a short inhibitory RNA molecule.

55. A method of selecting a subject that will respond to a treatment of breast cancer, which comprises:
detecting the presence or absence of one or more polymorphic variations associated with breast cancer in a nucleic acid sample from a subject, wherein the polymorphic variation is detected in a nucleotide sequence selected from the group consisting of:
(a) the nucleotide sequence of FIGS. 1A-1YYYY or FIGS. 2A-2B;
(b) a nucleotide sequence which encodes a polypeptide consisting of an amino acid sequence encoded by a nucleotide sequence in FIGS. 1A-1YYYY or FIGS. 2A-2B;
(c) a nucleotide sequence which encodes a polypeptide that is 90% or more identical to an amino acid sequence encoded by a nucleotide sequence in FIGS. 1A-1YYYY or FIGS. 2A-2B; and
(d) a fragment of a nucleotide sequence of (a), (b), or (c) comprising the polymorphic variation; and
selecting a subject that will respond to the breast cancer treatment based upon the presence or absence of the one or more polymorphic variations in the nucleic acid sample.

56. The method of claim 55, wherein the one or more polymorphic variations are at one or more positions in SEQ ID NO: 1 is selected from the group consisting of 50479, 50567, 51865, 58349, 58464, 68551, 70419, 73014, 75242, 75505, 78067, 78265, 78290, 78956, 79196, 81886, 82399, 83380, 86645, 86704, 88134, 96416, 96429, 96535, 110920, 14117, 117297, 117617, 118870, 123740, 123792, 123876, 123880, 126685, 126696, 126990, 127939, 146146, and 146312.

57. The method of claim 55, wherein the one or more polymorphic variations are in a region spanning positions 78265 to 123880, spanning positions 78265 to 96535, or spanning positions 117297 to 123880 in SEQ ID NO: 1.

The application's sequence listing, which the Patent Office published only in electronic form, follows.

SEQUENCE LISTING (141 sequences)

SEQ ID NO: 1 - DNA, 447894 bp, Homo sapiens
kaaaacttttcataacaaaggtttaattagaatggttaataactatgatttccaaagtgtctgagtcagttagggagttttgttccatacaaaatgctttatttaaccttcatgccttcattcagataattatacaaatgcatacagttaaaggtttaaactctatttcagttcacagctcaattcataggaaagttgaatacagaaaagcaatgcaccaacagaatatgtctgagacaccattaaaaacaataacacttgttcatttaaatctctgagaatagactggaataatcatcctctgagagaatctcattaggagggtctccctttacattatcatagggcaaaaaaatcaccattttacagtaaaaggaaaaaagctctgagtatatttacaatacatacactatacataaatacaagaacaacacttacataatattaataaacttataacagggttgcctaaacactacagagtatataaatgcagaggaaactattgggaaattaggtctttagataaactggagaaataaattcatttgcaattaaaatcctgaacagaaaaccaaatgaagatttaagaactcaacacatttgcttgccagcatcactggggggctttatcctttaatgtgtaggacctcctctgggcactcttaactccctggggtcagagacccaagagtgttttgtaaaattacatccataaagcaaatcagatgcagcccatctattcaatttgctgttcagaggcttcaagcctagaataactgttttgtaaactaaaggatgtttctgtattttcacacggacagatctcgtgatccaatcaccacgtataatgagctaaacgtcaaggaaaagaaaaaagatgcctgcttgatttggccaaagatgatatttttctttattcccatgtatttttttttcaaatatgactgagagatttattcaaaagaacatgacgttagaattgacccccacacaccaagaacaacgtctagactactactaattataactaagtcattttaagtggcaggtgggtatcttaaaggtggtctgttctcatcgtttcacaacacaaagttctgagtacattcttctatggacaaacatgaatttgctggtttctctttttttaaatgagcatgttatgatacacataattgcattatgatgcaggatgacataatacataagacgatgttttcaagctggttttataagtacttatctcacatccacagagagttggtttgccatgtgatgcaatgtgtcccacatagacatgaacaaaacaatacagtcactaccccacagggggacagtgatttttcaaaatgaagctttaaacacaacaaatcgtggacagacacgttgataggaaagagccttgaatataggcaccagtgccccagttcaacwatatccatccaatgtaataaagtttgaggaacaaaatatacactatattctggatgtaattacaaaattctgccatgggaaaactagaacacaagtagggcaaaagcactttttatgatttttttttttgccatatctttggagcatgaaattagcagaaagggaaratgttggtatgtccctaaaatatcttactttttgattgcttggacacttttatcactagatttggatccaaattctatcctcctattaacccttacttctcaacaaaaatgaatctctgtgaaagtcttgatgaacctgctttggaagaagatgcaataattcacacaaggagtccattcattggttctcgccttgcacaaagggtggactctgtctcaaacacttcaaatttctagagatgaaatccagaaagaaaaagtactgaggcgactgtttccactattgatctcttttcaactcacttcaagttgtggtttttgttgtggagaaattattgcttgtgaaacccaattaactgagaagggccccagtctgcagcaggttgtgcacatggaacacttgctttgagcatggaagagaatttgtttatacagcttctatctctttccccagccaagtaacagggagaaagataataattcaggagattcattttcagaaacagaaacactatgagaaatgacattctcttaatgttttctaagtccattagtacttccatgaatcaatactgtcagagaccttgttctacacagaaagtgggaggaatttcatttctctgatgttggacagcttcttacataawattcaattaaactaacaacaatactataaacaaattatttataagactatttaaaacattccacaacagagctgttaagtgagaactctgaaaaagaattatccattatctctcctttatcatcatctgaacgtttgattgccaccccattaccaactgcaagagtgggctctgatattaatcactagttccatgggggtgaaaatttcaaatgcatctgaagcagattctagaatgtctatattggtggaaaggtatacaaagagttgaggaactgagaaagtgtactcaggctaaaatgctactaagtatttggatgattttggagctccaggccagacatttatgagaaaagtgacaagttcggggagacaactggttgctattgtttgtttataatgatccttcatgcatgattttccgggaaaggcctgatttcaaatattcagtaccattgttaagtcatgtgttatatcatgtcccgatatttcacttgaaaaatatgatgactactcatgcatgttgtccataataaaattactgagagtcaggaatctgggaaggtggtttcgggacacccacgtgcagtgtggtggagtgggaaagatacaggcagacctccaggtcagagataggcggtttcactttcctactytgccgtttactatttctacatccatgaacaactcagccacacttccyatgtctccgtttcccatccataaagtgtagaaatgttgtacaggttgcaggtaacgtatctaaaaattgcctagtctattgcttggcacacagtgtttaataaagaatagctattatcttcatggtttgctgaatgtgtaacctttcaaggtactttagttttttcagacaacacatrgwaagaagcccagtcagaagacttgacttcagtgagattaaggaacccagcagctttcctttgacacttaattggttattttacccccttatcctggtacatttccktctcccttttcttctttctaacattgggaggagaaaacagtggatgtttttttgaggcctgtggtctgagtccatcatggaagtctaaagcctgaatgtttaatcacagtcctacttttaaaattgcccttacccgatgtgtgactctccatgagtataattttactgatagcctcagtagcttgtttgggtgaatttgtgctctgagatggcagggttggagaatttccagggttcatgtctattcatatagtctcattgtatatttctatccatgactccacttttagcagtacagtaattacaggaaaaaacctgtgagcttctgaatgtgcatctggtaatttttaggactractgcaaagatggttaaaggctaggcttactaagtgtcagtggtacttcaacagactttttggggagaaatgattctgtcaatattcattccaaaatgattcttaagatgataataggaaatattaggggaaaggggaatgaagaaatgtaaagatgaatttgtgcgtttgatatgagtggataaaatgaacaagcaaacaaatatccttcagtcttttgcgccaaataaattggtgtttttaactgagcaaaactttttgaatcatacatactgtttcataagtttggggcaaatgacagtcaactttttatctggaaattataattaccatatgcaatagtgttcactgaagataaacttaatgttcagatttgtgttcttaacgttctgcaagttagaaagatcaaattaagaaatgttaatgtaaacaagattaggtatatttgaaagctataaaagcgttttttgtgggcatgtgaacagatttgatttactatgtgtatgtatttactctctctgtgtgtatgtgtgtgtgtgttcacatgtgcaggaaaaaacccagtcttattaagaattattgctgtgtaaaagtataggaatatctcattggtcataaggtttactgacaggcactttcagcatttaatttatttctgaaaatgggcattagcttattcctattgcgagtatagattcctttaacacgtggccatatscacagcacttaatcttgtcaacatgtagttatacctaaaagcagtctccctggaataaaacaagaataaacacctgtatggttgttcacactctgttgaggagggagataactgagaaaagagaacaattgtaagatgctcctctttagtacaagcaaaatcctgtgcagctgttttgcccttttcaggaaaagacattactagtttggaatcagttgtctgcaacttaaaatgacttcattatattttaaaccatcctggctaaaccatgacaagtggccactctattttgaacagaacacgaagagcatgctctgacaaagttggacagagttcccatggcaatttcactcattgtgtgtaagatatacaaggcatatctgaacaagttttttctttttattgtgatgaaaactagaagctctctttcccaacatacttcatcaaactatttacaacctctgtaaaatttgtgagtttgaaaatactttttccactatcacatatgttacgaatacagtaaaatatcttcactctatttkttaaagatgcagtatccttctatttcattttcttatgaaaatctggatttctattgcaattgctcagtaattagcatatttaaagtatcagtggacatgggttactaaacagacattataatgaaactgtgaaaatatagcaatttttatgtacatttcttaactataaaatgcaggcagagtcatatatagtattataagccggtttcctaataaggtaagtaactcacatttctagacagcacrgattattacaaattctttttaaaaaagttctttgctgatatttgttagcccactggctgctgcatatacagttgtgtacacacatgtgcatgtgttggggctgtctgtacaggttaagtggaaggcagtgtggggatgagtagaaatgtcatatggaagacatgacttaccaaacccctttctaaactaaagccaaatctaattgaagagacttttttaatgggatgcactacctcagaaaaactaaaggragaratttggtcaatgatgttttatactagaatacatttacctgctaagtttacaggcaacattgaagagcaaaatctgagactggattatgaactatgaatattaaggctttctgggcctattatgattcataagagttacctcacattcagtcccttatacgcagactgtaacatggatgctggtattcttaacactgcttaatttctgtcaatcctcactataaatgttaagacatctttagaacaacatcatggctacatttctaagcagtcataacaacataacaaaggcgtattaatacattttgaaggcctcacctcaccagatttattcagttgcagctttggtaagtataataaatcaagtacagaataaggaatactgcatctttatccatataaatgttatcattctaatgaactgattccaaagtgcagaattatgtttaaaacacagatggcaatttaaagttaaaaagaattgtataaaaatgaacacaatctttgcataagctattccaaatctgaaccataatgaaaacggcctttctaatcacctggaactggcatttgtaaacactgtagcattttgtaagtttttcccctgacaatcatcttcctttttcccacttaagctttcaagtgaatgaaaagtgctcatttttttaaaaaatgtggtttatgttgctgttactcaactgcttttgaaaacaaatgtcctatagtgttttatagaaacgacgccaggcagaagtataatctttatggtgaagtcattagaaatctcagtctaactgccttaatagaacttaagacaagttatcaagcaggcttctcagagtccacacacaattgacagaatgagggcagaggtggatgcagaagcgtgaatcttttttcaaacaacttaagatcagaccatgaaaagggattcttaaaacctcaaaggctgaaagtcataacttttcaaataatgtaactcccttgaaatcaatctctatactgcaaacagaaaatcaggtctactgcagctgcttaagtagttaatggctctatgtgtataagttcccaaccatgcacatatccccagctgcaaactgaacagcttcaaatttaaaatcaaagaatgcttctagttacggaacaactgttatgtcctttaggattctactgcttttctgttgctcatgatgcactgtgctttttgaaagaggctagaaatggacatgagatgaaatggaggctcttccatgactgaagacattccatttctttctgtcccaaaccactttctcctttccatggggaaatacttttagaaaactcaccaaggagaatttgccacgtctcaagacaagccccaaagaagtttcagttcctgaggctagaccagggactcaattcacttaattgtgcttagatcccttcttagaagtactgatacgtcaaaaggggaaaatgatggaatgctgacaggttttatcagttaacttaccatctcagtctggtttccactttcagaggatgagggaaaatgttcccttccccaaatccatcctatgttattagaaaagtgcaactcatctagttctgtgctaaatttaaaccaagctgtcactcaggaagattcccctgcctgtcagttttatgaattctaaaaaccaagtctacctgtaatactctcaagacatctttcagcagagaaaagaactggctctttttatgagagcaagcaggactaaatacaaatctacacttcacttgagagatgcacccactacttgccaactaggtgctggtactagtgccagggggttcatggctgtgtttgtccctctctgtgttctctgtcactgactagtaaccagcactggcatgcatcaacagacctttttctattctgaatggtcacaggcaatgtgaagtaggagttgcatatagtacaaaaaaactttccaggtgctaaaaaaaacccactggttgatgagtagtagactgtgcagctaaagatgctatttatcactagaactgcagcccttgttggagggaaattgcttgatgaatttttgagacctggcagacaatatagagcacatatttgtgaagccataatttgacctgaaaatcattacactgttgcttaatgttttaaaaaattccttttgaataccatccaacacaaattgtccttgtttcaacgttcatagttctcgcttcatcagaataagattatctgaattagaagatgatcctaaaaagggtaattctgtaaccggaaattatttcagaatgtccagacatttaaaaatgagctagtaatattgtgaggttaatatgtgcaattcccaaaatcaagtgtttgtaattaaaatatattgcaaaggtctttgttggagaccttttatatctaagctataaaaaattctagcaacaacaacaataacaacaaaaaatctcaccagcccctcagccacagaaagctggaaaaaaacccagcttgtggtggggacaaaaatatggtaatttttctgaaagaatgctcgttggtgatgtattgcttgtttactgtatatgttcctagttgcaaaaaggttcataattttatggggctgatggaactaacaccttcctctcatcctctgcacaggatgagtgggttcaatatccctgcagatgccaatgcaggacacctgggtcctgatacagtttagaaaatgaaatcggtatagaagaacctattggagagtcacttatccttggctctccaagagaggaaactagcaccatgtcgggctttctatgggaagcattctctttccactgattcagttccaaggagaactgacccattaaccgaagagttaattcccggctatgcctcccttgcctttctagtcaccaaataactgttttcaaacaagaaaaggggagcataatctttaattgtggtactcaaccaagcaggacaacaaacagcagaaagattacctcagtgctgtaaatggaaccaagacacctaaaatgctggggtgttttttacaatccctttagtaagtatgaaaattggtaacgtgagtcctcagtgaagttattgtaggaaagtccttttattcattattgcttttctcctcaagaggcgcattatttccatctctgctttgtctgagttttcatgttcactgactttgcctgggcagccccacctcttaccttggtgccagtgtgtctaagaaagtttttttcccctggttccttgtaatcaaatactaggggcaggaagagatgatgcctaggtgacagaacactgcaatttgaagtggggcagtagttttttagacaggctcttcctattcaactacagaacacctctgtgccagtccatgccagggcagagaccaggacgagacttcaactgcccctctgctcgaacagatgaacaaaacagaatcgaaacaaaacaaaaacaatcaacgacaaacaaatgaaagattcaatgttggttttcttcagggcatggcagaatgacaagttgagagtgatatctagtggctgccatcgcgattgcaaagggctgcctgagtgccctttctttgcaggtaatgggacctctccatctgcttcttcgtttctactttcatgctgcttgctggtaacagattggatgtgtgttctagcttactcagattgtaactaaaatttctgtaaaaaggggttaagggatgggatgatgggagattcatccaaatttaaaaggtcttgctctagccatcaatttgtggtaggtgacctttaaggtatcaataacaaaatgtctgacagctcagaaaatgtacaagctacaaacatctttaaatggcagaggacacagcacggaaaacaatgcctgtctcttcagcatttatgtcactgagctcccaggcccgggtaaagacggttctcgtctagtcatgatgggggttaccttcagaccaaaagaagtgtgccttctttttcctgctctggtttcagacatcgtgggatggtgatgcccttttgtgttaacactgtgaaggggattcagccctgctgaattgggtgccgctaagagatccagctcttacgctcagctggacaggtagcattcctcacaccaacatatgcctccggcggtgcagggccaaatgatctgaccgggaaaagctgcgatcacagtccgcgcacttgaatggcttcactcccgtatgtttgcggtaatgcctcgtcagttcatctgaacgagcgaacttccaggtgcagccttcccaggtacacttgtaaggtttctctcctggaagaaacaaaggaacacaagctttggtgctccatccatcactttgccataaccaggccagtactctattttgggaaactggtgttctcaatgaattttcccgttggtaaatctttgtcgggaaaccttaccatcccaccagcggtctgggtcagacaggtgatggtttcaatctcgtcttgcctgctgtgacatctggcaagctagttaacactggtgtcctccattatgactttgccatcaacatataaaggcatggattgactgccactggatatatcaccactagtagactaaaaagaaattactaaagctttacccagtttgatttgattttaaggctgaaagtcacaaagaattcttacggtcaagcagttatgccttgtttcaacacccccccacgcttccccctaccaactgtgcatcacttagatggcttaaggctattttaaaacacaatgtccaagaatatacacaaaattttactgaacgataatgtactctactacctccagatatcaggtattaagtacatattgttcatagatatctattttttgcttgttctttgggggaaaatcctagatgccttaatagtgtaaagtttaagtacatttttcaggacttaagaatcagggtaagccctgagaaatcatcacgttggtcctagagctaaaattcacagagaaaagctgtctgaagaagcatgtaatttgaccgggtctctcagtcaacttgtaaggacagtaaaatatgcaaaggctgtgctgggaaaagatacactagccattgtccaaatgagctcccagggggagtgggacaatagttgacccaggtgtgccattttcctggatctcattcagaatgggaggcttgtccccatgcaaccccacaaaaactgatctctcttctgccccttacacccaacaatctacaatgtgctccttggccacatatggcctctggtgaaaagagcctaagatagggaagggagctatctgctgttcctcatgcacaaagctacaaagggggtattgttgacaccacttcacagatgagaaaactgaggcttcaggtagtaacattactcaaagccagtaaaaagatgtgcatggctctcaatccagtgcttttcactattttacagtggaatggattaattcttaccccatctaaattttgtcacaacttcagacagagttagtgtcactttcttaggtatgaccaaattattcacttcctatttctatgacatcacctatcacaatataccatgaagatttcgtttagacgcccttctgtaccagtttccgaatacttggagatctgggactattctgcctctactatttcagtgtcactggagcctagaatagctgccaagcaagtacttgaatgtattaatacaactgcaacacacacacacacacacacacacaaatacacacacataggaacatatatggtaaactacaggaccctataaatgagatgtgcaggtaatgcctacatgggaaaactagtccaaactggacccaacatttttcattcaactgttaaatcaatgctgtctgtgtggattcttacaggatcaagcagccctttcagaagagagtgaatagttcaggcctgttaaatctagaaatactgatggactaattgtggccccaggttgctctaggtttttctgaaagggctccttttaagaaaaagcctactgcctggattgacaccaaacctcaacttctgattcactgtggttgtcccatggagacaaaactgcatttgcatgtgtctactgaccaaagtttgacagaaatgaaacaaaaatcagcaaaacccctaacttagaaagattggaggtctactatatagtattatctacatgcttttacgtgttacatgtcatctctacatgtttttgaaatttatactatgagcatagttgagcttgataaaattcatcttttcaaaaatacatccatctttggtacattgagctgagctagttggatgttggtcaccgagagccatttcttagctatttcctgtgttgctatggaaccagctagagagagtgtaaggcctaaaaagaaaacaataaaatttcatcttcactggagatgagcgttgctcagttgtgtagtatagaaggacgtgtcttggtgagggagtaaacatgagattagataaactggctgggtgtggttgcttacggcagtaatcccagcactttgggaggccgaggtgggagaatcacttcaggccaggagttcaagatcagcctgggcaacaaagtgacattctgtctctccagaaaattttttttttagttagccaggtgcagtggcatgcacctgtagttccagctactggggaggctgaggcagaagaattgcttgagtccaggagtttaaggccgcagtgagctatgattgtgttactgcactccagcctgggtggcagagtatgaccccgaaagaaagaaagaaaagagagaaaagagagaggaaagggggaggggaaagggaaggaggaggggagggggaaagaaaagaaaagataagctgctggatcctgccctttacattccagatagtgaaggaaggggttccataacaggagtgcacctggggaggagaggtagacaagaacttccaggctcatcttaacaaggatgtgagaggctggtagcaaggtagagatgatttatacctcaggtgctgtctagctttttttgtacttccaattgagtcacttaaaattctctaatttcttccttaaaatgataccagtcatactttcatttttatgttggctatttaataatggtagttatgtcctttccacttgaaaatctggagcagggggtagtaaactgcagtccccacttttacaattttaaaggttgaaaaaacaagaggaatattttatgcataaacattatatacgatttaaattttagtgtccataaataagtttttattggagcacagccacatttatttatttacacatcattccggctgttttccagagatggaagagttgaatagctgcaacatataatgtatggccttcaatgcctaagacctttactatctagtcttctatggaaggggtttgccaacccctgatttttataagagatggccatctctgctttttgtaagcttcgtgaatatgttagcttattgaattgggattatatattacacattgggtgttggaaatgggtgggtgagggaatgttttagttacagttcaatcacttaatctcaaattaggatcctcgattcaaattctaacagtcctctcagtgataaacacacatgatatttcaaatacttcaaattgatttctgggcaacaggaaatgagtcactctcttagaagactcacccactgaggacagtggctcaggcttataatcccagctacttgggaagctgaggcaggaagatcccacttgaggccaggagttcgagatcatcctgggcaatacagtgagcccccccacccccccactgcaatctctaaaaaaaaataaaaataaaaaaacgtagccaggtgcagtggctcacatctgcagccccagcgattcgggaagctgaggtgaaaggattgcttgagaccaagacttctggtctacagatgtgctatgatcatgcagctgcattccagcctgtgtgaccaggcaagaccccgcctccaaaatataaaaataaataatttttaaaaatgaaaattaaaaaaaattgaaaaaggctcacccaactcaatcagacctaaaaatatcctcagaatcttctgctcattaaaaaagtacaataacctcacctatgagggtgaaggtcacatggtatgaagatcaggagtgcctctccatacttcacctggtaaccaaaagtaaggattctacattacgatggtgccccacctcacctccagctcctttaaatactgttgtattaaaatagccactgtgaacactgatgagttaccttcctattgagtctgggaagtggggttacaacatgagaaggatcagaaagtagaagctgagatgtttggaactgtttctaagatggctattttaaaggcagaagcagcagggaaaacagcacctggtagagcaagggtttgtctgagcccataaatgtagagtggggaaacagtgcaagtgaagtgtgatcaagtgtaataaacaatcgtgaaaaacaagggaagaggcctcagaaatacaagaggcagatacttccctactccacgaataaaatcaataaaaatgatatataaattataagctaggccagatgcggtggttcatggcagtaatcccagcacttagggaggctgaggtgagaggatcaatcacttgaggccaggagttcaagaccagcttgggcaatatagcaaaaccttatgtctatcaaataaataaatcagctggtgtggtgacgtgcatctgtagtcccagctacttgggaggctgaggcatgagaatcacttgaacccaggaggtggaggttgcagtgagctgagatggtgctaccgcactctagcctgggtgacagagcaagactctgtctcaaaaaataaataaataaattaattaattaattaaaaagaaaaaataataataaaaaaatttataagctatttggggctaagtaactaatgaaggcatgtaataaggaatgaaaacctttcctatgtgggggagggggaagaaagtatatcagaaaacagtaatttaattatctaagtgataaaatgaattttccttgaaattttccttataaaaacatacacttttacgatccccccaaaaatcctatgcataatattcttcgctcccattgccccattaataaaattagaatttaagcattctctcaccatgcttaaaaaaaaaagaaaacaatatcttcaattctctcctcaaaattagaggctgagttatgggggtaggggaagagaagatggctactgtgtccagccagagagctcaagagagacctgttttcattatatacgcccagtgcctagtatttcattaaaaaaaacaaaacaaaacaggaaagaaagtctataagtgctctctttagactagtgaaattttagaaatggataccaaaaatttgagtagctactgcattgtgttttaacaggacactgtatcttatgtttgtgctttgaagcaatttaaagcacacaatcttataaacacattaagacagcagaaactaacttcatgatgagagtaaaaaaactaattagaaagataattaagtttgtaagatatccagtagtatgtgtaaatgagccctgaaaggctatcataaagaacagaattgtcttttttgtcttctttcctttaaaaacttgctagaaaatagaaagctaaatataatttttaagaagtcagcagcagggacagaatggtgaattttccatgaaaatgttcctatgaaaagagttggctgggacaataaatggagtcagacccctcccagggcctgggctgctgctgcacctgggcgactctgcatcaggttgagcagtggtgatcagaaacttgatttctattaatttctttagaaataatgcatttcccctaaactcatttgaattagaattcttcaaattacttgaattctgtaacacacataagaggaatgtgcaaatgtgttattcaaaactattttctctggaaataagctaaaaataaagacagcctacctaccttctttgcttcttttgtctaactcacaagtacacagtcaacctcttttgacaatagtctttaaaaatgtgttttatgtttttctgaataatctaaagttttgactttactttgatttgataatctttgattttggtttcttatattaaatctatgaaagagcaaacttacagaaaaaggtattgtgcatttctttgccaataaatcttaataagttttttttgtttttaagttgagacattacatttttgatgtaaagagaaaaatcaaaggacactagttgggtaacgggtggctagctgggtgataccatgccagtgcttggtgtatagcttattaacttctaggtcttcaattctgaagggatggtctctatgtcccatgataaatccttaggccacttccaggttttgtatttaaaaaaaaagaatatgaccattttcaccacaacctgtgcttctccagttctgtgaaaaacctggactaaactaggaaaacttctgaaaaagaaacgtgttaaccaacactaataagaagagcatctgttttttaaagtgaaatagtcctctaaatgttaaaaaagacgacataccacacacacacacaaaaaaagggtgggggaggtgtggttgttattgttcatcctgaaaactctgtaactccatttcggagttcatgttaaatacaactttctatgtatatgcagcatataaaaatgtaggtattatttaaatagactaagtgttctgggaaaacaaaaactcacatcagggttttgttttgttttttcttgaaataaccaactgatggattatgaaaacggctgtctctttcaattttggttaaagaaaaggattaagagtcactaagtgcatttccatgacatttacccagcagaaggcagaataaagtctaaagaaaacaccaggtattgaatggattcccaaaacccaccaaacaaaaataactttttcaggtacctcccatttcgccatctgaaatgctgaaaggtacatgtgtactgagacaaaagacaggtgccctttcatattaaaatgacgtgtgagcaacgcacataagaggaatgtgcagtttgaaaaagcctgtgttaaacaaaacatccatgttctcatcagcttctctattattttctcaagcaactgaaaaggaacaccttttgcaacaggaagcacaggcattttcttaggttcagaagtgcatttctgaaacgtgtccctgtttaacttttataaagttacggggccccagacactgacaaatgagcttcattacattcaaggctcaacgtatttgctgtgacaatctgtttcacttgaggaatggtatttgcatatgaggaaaaaaacaagaatcaagattcctatcttgtcttctggtttctgttacattagttcatgaaagttcacagaatctagatctggaaggaaattaggtaccttcaagatgaggaaactgaaacctagaggcggggaaagagctgagattacaaggcccctgacttgtctgcagacagaccaggcggctatacctcttcatagtttacggcagcatacaataccacaggttttgaaatctgaaagagcacacagccatatacaggcttagtcacctatatgagattgatccaaggccaaaaagttaagctttctgaaagcttcccagtttgaaagtttcccagtttcctcatctgtaaaacaggaatgccatttactcctgcagcactgttgggaaactcaaaaatacacacactacatacctggcaaataatacccactcaataaaggatattttatatttacaaaattcagggtatttctgtttttataaagaaataaaaataatataaagttaaaaatggatcctgtttgctattttttcagcaattaattatagttttggggtaagcagatgccaatcctgatgcgattttcttaacattttaaagtataaaggtactttataggccaagcagaccaatctattccataatgtccatttggtcctgtcaattcaatcaaataagtaatcaatatgccagtctccatcctactgaattgcctggactgaattaattggctatctttttcattaggtattatgaagaccaagtgggttccttctttcctcctctaaataatactgcatattctctaataagtattgttgataaaaattatatttgctaaagcatatagtactttccatgtaccatactttgctctaagagctttatggatattacctcatttaattttgataacttcctaaagaagtcgttgcaataactaaccccacttcacccagtgtcgtcacccagttagcatgtgtctcaattgccactcaccctgcctctcaacattttaaattagtgctgtcataaaccaggatatctggtcagaactgggcacggagactgcaaatgtgagctactactcacaggacagacaatagtgttaacaaacacaggctagcccttctcacccagaaatccgatataagtgaactaaaatatcccataataaaagtgaactttagtgtaagtaaaaagttcaaggtcaaaagacaatattttatttggctgttctgagttttcatttctacgtagtgacctttcttttcctatgtgactggttactttttccttggtttcttttgcagagacctcttcctttacctgttgcataaacgtttccaaagattttgacttaacttctcgcgtggcaggtgttcctcttggctcatatgtcttccactacaacctataagggaaaagactcctaagcagctatacctcagtctctctcctaagcgccagagagggagacaggacatttccaactggtggtctgaaagcatcttcaatatgagcaaaacttgctcagcatttgccacctaaacatgttcctcttccggtttttctggaaaaacagtaattccatctactcaggtaccaaatcgtcaatgtctccagttggagagatttcttggactcttccctctgtgtgactccctgcctgccccactctgataattacatctgccagttctgccttctaaaatctatccagcaatcctcccagtttatccccacagtggtggtctaccttgctttaggtcctttccaccttttaccaggaccagtttctaatgattctgtttctccgtcttgcctcctatgcacaccaatttattgtccatgctgtagagaaagaaaactttttgaaagataatctgatcatgccacttgttggccccatagtaccctgagacactctcttcacaccacgctgtgattgaaggttttcctctctgtccgactcagcagtgccgactcagcagtgccgtactgtggatgactttgagccttcttaccactgtatccccagggcctaacacattagtgctgtgtgctaataaagacttgttgatcaaaggagtgaaactactttaatttaaatactttgttcttttaaaaatagaacataggagggtcaacataagagtaatctattttgtgagacaaagagagtacactgtttacattctatctattctataatgttttcttgtctaatgaattagaatacatacttttgaaaataaaaatatatttgtgaggtatcatttaatactagtgccacttacagttctagtctgcaaacaaatattttgttttaaacctctgaaattagtaacgtgtgactgagccttgtattctgttgctcaaatgagcattattttaacatttaaaatatatctcttacaattgtattattcttagttatggagatttttaattgaattatcataagcattatgaatcaacattttatttatttatttattttgagatggagtcttgctctgtcgcccaggctggagtgcagtggcatggtctcagctcactgcaacctctgcctcccaggttcaagcgatgctcttgcctcagactcctgagtagctggtactacaggtgtacaccaccatgcccagctaatttttgtaattttagtagagatgggttttgccatgttggccaggctgttctagaagtcctgacctcagatgatcctcccacgtcagcctcccaaagagctaggattacaggtgtaagccaatgtgtccaatcctatttttatatattctttaatgatgaatctatgttctatcaaaatacaattccttattgtctttaataattccattaaaaccacaaattttatattagtagttaattttaccatttaggatatgaccaacactcaaatctagttattcttaggcagaatgagagaaagtagaaagactgaagatattattattccataccttttatataacccagctttgatggatgtatggataaaatgaagccagaagcaaaggaaggagaatgatgtcacaaagacacgataaagatcccatggcggccgggtgcagtggctcacgcctgtaatcccagcactttgggaagcagaggtgggtggatcacaaggtcatgagatcgagaccatcctgtccaacatggtgaaaccccgtctctattaaaaatacaaaaattagctgggcgtggtggcacacacttgtagtcccagccacttgggaggctgaggcaggagaatcacttgaacctgggaggcagaggttgcagtgagccgagatcgtgccactgtactcctctagcctggcgacagagtgagactccatctcaaaacaaacaaacaaacaaacaaacaaaaccaatggcatctttaactttgcactgtcattgataatttatatgctaacacaaacagaattatgaaacacaactcatttagttatttatttaaatgaggtaataatggataggtttagaagtcttttctaaatataggaaaaaagatcaacttatttttaattgataggtttagaagtcttttctaaatataggaaaaaagatcaactgttttttaaataaaaataaggtaaaacttttaaaacaaaatttgttcaactatgtacagaatggttgcctacattccaatcattgtaaatcttaagcatgtgtgtctaaacagtaactctccatgataggttaaaatgactctcttccccattgatgaaaataagtgctacacctgcaaaacattttgttaccaatccaaattttttgttttccttgttggaggtggcactgaaacatgcttgtctgcataggcaggtgatgcttgctgcatccccccagtcaggaccaatgaccccttcagtgctgctgtagcaacctgcatagagctcgctcagggctttcctattacgtattattttatatgctggatatgtgtgaatgaggctgtctctcccaccagatttaggactccttgctgtcttcatttgtacacagcacccattacattcaaagagctgtgtgccaaacaagcactcaagagcagcctatttaattttatttaatgattaatgcttttggtccacatcttctcactggcttctaacaaaattttagtagactatggagaaagaccactctatgttaattaaagccttaaaaacagattaaagtctcttgctctctcattactttaccgtccctgaagggctgatgctgaacaggtaggtactgctgggtagacatgcataggagcacggttccagtgaagagagaagactcgtaggttatcagcaaactagtctgagaccagatataaggaaaagcataggctcgagagaaaccagagtttcaatcctggctctactgctttcctaatacctgcccatgtccacgtgccctaaccttgctcctttccagggatttacatgtgtgatgagtatatgtaaagcactcgaagaggtatgtttgtgttcaaaggtaaaaaagaaaacctgagattcacacaagtagtttgtctaagttcactaacaagttaggggccaaagagattgaaacttttgtctctggacttcaagtttggtgatatttctattatattttctaatgtctcagcagttaccaatatagctcatattcatgagctatttgatcaggacttacaaacaacttacggggagaggatttttccttgaaaaatgtcagtgtgctcttaaatgatttattatcttggcatcactaagcactatgctttatctaacaaggaacctagatgggggggtctgaaatggagctttatgtggaatgagctatttaattaatgaatacagatgtgaagtcatgaacagcagcactcactcgtctgaagttaagatctagcaaccacaagcacctgcgaacaaaaggccaccaggatgcacagctgtcacaaagcccctgattttctttgtaggaatatcctcaaaccacttcagaatctcatccagtaaatgaagatgaagattcaaattagaagcaagaaatactggaatagcagcaagaaatgatgaggcaagtaagaaagtgagaaaagacagaatctgcaatcatttaggatcgctatgtgtggaggggcgtgtgtacatatgtgtgtgtgcattccaaatatgtaatcaaatataattaatggaataaacatgtaatagtatttgatattaattacagagacttcattcatcaagagaaaaattattaaataatgtgtggtttcataaaggtagggaagatcatactctggaaaccattaaatcagaattgcttaatatttttaagtgtctatatgaataaacttccttaatgtacaaaattcagatatgaataattcctaagaaatgtgactaccttaagtttactaatttttaaggttagaggtgtatggctttcatatgaattaaaatgaatattatacaggattacctactgggcctcacaaatttatcagagaacagtatgtcaattggggatagaaaatatttccagattcatttgaacagactatttttacatattgtaattcctttgcaaaaaaaatttgattttatctttattttgccttttaaaaaattcatcattaaattgtaatattctgcagaacactgataatgtcagtgtcattgttccattttaatgtcatgtcatacatactgttagagttctagtttctcttcagaccctcttctagactagacccaacatctggttctggtgcaccatctagtggctgtaggaatcactgatgcctgaatgttacttgcttttactgcattgtagaaattactagagcatttattttttagaaaatagtgagaattctaaaaggcaaaaccaaattcacaaaattattttcttctaaaattcaaatgcaaatcagttaataagcaatagaactcttaacgtgagggaatccatagtgcataattgttttgtatagcacatatttaaatgaccatattaatttaaatggcaatgcatactcatttaagtactaatatttatttgtgaatatgcatatttatttaaatactctgtaaactgcttcatgtacagagacccacaatttagacagtggatataaataattaacctgctgacaataatgtgtatgtgatggctgagatatattttttcctttttttgacatgccttaaatgattaagcacaagcaggcattaataaactcattcaaaaatacttggtcacatcttcgtgttattatctaaactgtacactcatgaaaatatacttatttttaatttagaaaggcactcctcagcatttctttttctattctaaattctttgctaatatctagaaaatgtacctctttcaaatacctacaaatatgtttaagttactaagttgtaaataaaaagatgactgatcaggtacttatatggtacaaaaagatgaagcattaaaggcaaaattaactttctcaaagcaagtttctcactgatacttactcccctcccatagcgtgcatggctctcgtaagtcaactggtataatcccaaattccaaattaattgttggtcacacacaagtaacttactcaatatgcctgaagcaaaggtaaggctaagaagatgtttactaagagcatgcaaaccaacctgattccctatagaaatagttttgatttcattttgaacactgttacaaaatcttatacataattataaatcagaagtcaggatgggctcattttgaactagttacagaaaaatcaaccaaatttcactttttttctttctaaaaataatgttatttgactgataatagttcaaggaagccatgactgcacatagtaactatctctctgctaagtggatgaatggatttgacatatcttggttttgggcaggtatttcacaaggacatttagatttaactgtgaggcagagaaatgtgagctggaaacaggagagctaggtggattctggctactgtttaaagaattaagacctatctgaatggaggcctctcggatcatgtcttagggttttttccttgaacgcatcccattcaatacattcatcaattacctggcacagatgaagaagctgaaacagacagcaaaaataatgaaagcaaagtgggtagggagaactttcaagtcatttcaatttattagaataatgggcccaaatcaagaaaatgaatatagaataattatttcttagacttgaaaaagtatgtgcaacctcagaataatgattctgtcctgtatttccagcctgtgcctcaacactttcagtgatagggaacacactacttccaagcaaagccatcattaagggacagctccaaccacacatacaacatggcatgtttaggtttaaaagaaatctattataggtacaagggatagacaagatacagttgttagcagtttttgatttagataacccaatagagtaaactgctaaaaaaaacttaacaccatttttgcatatacaggcatatcttattttcctgcacttcactttattgcatttcgaagatattgtctgtgtgtgtgtgtgtgtgtgtgtgtgtgtgtgtgtgtgtgtttacaaattcaagttttgtggcaatcctatgtcaggcaagtttactggcgccattttcccaagagcatgtgctcactttgcatctttgtgtgatacttgggtaattgtcacaatatttcaaacttttaaattattattatattttgtatggtgatctgtgatcagtgacctttgatgtttctactgtaattgttttgggttcgatgaactgtacccaagacggcaaacttaatggataaatgttgtgtgtgttgtgactgcatcactgaccagctgctaccccatcttactccctcttcttgagcccccctattccttgagacacaacaatattgaaattaggccagttagtaaccctaagtgttcaagtgaaaggaaaagtcatacatctttcactttaaatcaaaagctataaatgattatgcttagcgagtcaggcacttcgaaagctgagatgggctggaagctaggcctcttgagccagttagccaagctatgaaagcaaaggaaaagttccagaaggaaattaaaatgttattccagttaacacacaaatgataagaaagcaaaacagccttatcgctgatttggagaaagtttgagtggtctggatagaagatcaaaccagttacaatatcccccaaagctaaagcctaatccagagcaagggccactcttcagttcttcacggctgagagaggtaagaaagctgcagaaggaaagttggaagctagcggaggttggttcatgaggtttaaggacagaagctgtctccataacatataagtgcaagttgtagcagcaagtgctgatgtagaagctgcagcaaggtatccagaagatctagctaagatcactgatgaaggcagccatactaaactacagattttcaatgtagatgatataccctcctattgaaagatgtcatgtaggactttctgagctagagaggagaagtcaatgcctagctttaaagcttcaaaggacagatggactcttgttagggactaatggagacagtaaccttcagctgaagccaaggctcatatactattctgaaaatcctagggcccttaaagaattatgctaaatctaatgctaaatctgcttgtgctgtataaatgtaacaacaaagcttggattttacagcatggtttactgaatgttttaagcccactgttgaggcctactgctcagaaaaaaagattccttgagaaatattactgctcactgacaatgcacctggtcaccctagagctctgatgagatgtacaaggagatggatgtttttctgcctgctaacacaacatgcattcttcagcccacggatcaaggagtcattttgacttttaagtcttatcatttaagaaatacatttcgtaagactatagctccatagctagtgattcctcttgtgaatccaggcaaattaaatttaaaaacccctggagaggattcaccattctagatgccattaggaacatttgtgattcatgataagtcaaaaatcaacatgaacaggaatgtggaagtagttcattcaatcctcatcgatgactttgagggattcagggcttccatggagaaaggaattgcagatgtggtggaaacagcaggagaattacaactagaagtggagccgggcgcggtggctcacgcctgtaatcccagcactttgggaggctgaggtgggcagatcacctgaggtcgggagttcgagaccagcctgaccaacatgaagaaaccctgtctctactaaaaatacaaaactagccaggcatggtggcacatgcctgtaatcccagctacttgggaggctgaggcaggagactcacttgaaactgggaggcggaggctgaggtaagccgagattgcgccattgcactccagcctgggtaacaagagcgaaactccatgtcaaaaaaaaaaaaaaaaaaaaaaggattagaagtggactcaagatgtgactgaattcctgcaatctcatgataaaacttgaatgaatgaggaactgcttcttacggatgcgcaaaaaaagtgattcttgaaatggaatgtattcccagtgaagatgctgtcaacactgtccaaattacaatgaaggatttagaagattttataaacttagttgataaagcagcatcagaagattgactgcaatttagaaagaagttctatggtgggtaaaatgttatgaaacagcaccacaggctacagggaaatcttctatgaaataagagtccactgatgtggcaaactttattgctgtcttaagaaatttccacatccactccaacctttagcaactatcaccctgatcagtcagcagccatcaacacagaggcaagaccctccactagtcaaaagattacgactctaaaggctcagatgactgttagtacttgtgagcaatgaagtgctttttaattatgtactttttttagacaatgctattgcacacttgagtatagtgtaaacacaacttttaaatgtaatagggaaacaaaaaaattgtgtgacttcctttcttgtgatatttactttattgggatgtcgggaactgaacccacaggatctttgaggtacgcctgtattaagagaagtccattcacaggatatgttccctcaatttgtggtatgaaaacttaaaaagacacagtgatcagttggagtgtatctacaaagacacggctgagaaaactggaggtgtttgatttggagaattaagatgttagttggttcatgacagtgttgagaggaacaccggggccagtgagtgaaaattatagcattatcattagagccattctgttcaaccagaaggttccaagacctaaacagcaccgtaagaggctactggacattgtaagagaggagaactctgtcttcagattgtgttgcagaagaatatgcggccactcagagcatttaaggagagttggttaaactactaatgtgggaacaatagtcagccagaagtgccaaagagataataacagctacaaccatctggttgttaataacaaattttttaaaatacacataagtatgcagaaaactgcacagcagtgacttgctctctgcgaaatatgacacgcaaggggttccccgaattaggaaacactagactgtaacatataaagtccattctgacccttagagtctgtgatttcattgtattaatagccaagctaatcaattctgcttcagcatagcattcaaggttcagattgttttgaattacaatgcataaatgatgtctcctctgctctcatggtgtatgttagaatctgtaagatgcaatcctatactgccatggagttaaatcctttaatagtacctgattaaaaattttcctctctttcactgttcatcacttgggtaagaggagtggaggtgtctgtgtgaaaatgaggctaatatgtattccagaaaactcaaagagaataggaataactcaaaatatgtgatgattcattgtagaaagtcatttttttaaaaacagaaatgctcctataaagtcagtaatatggtctaatcatacttcctgccatgatctgtgttcactatctactggtaggatggaatatacttactcaatttccatgtcttcacactcattctttgccttaatgataaaggaactgacttaaaaatagagcctaagaaacagataaaaacctctctttgggaagctcagaatcgtagaaaaggaagaatctagaataagtagaaaagagaggctgggtgcagtggctcacacctgtaatcccagaactctgaaaggccaaggtggaaggaccacttgagcccaggagttcaagaccagcctggccaacatagtgagaccctgtctctaattaagtaggaaagggaaaagaacagggagcagagagagaacatgggctaaatggaaaatgatgctaatttcaattattttgatacctaagctgggaggcagtttacagagtacagttcttttcacatgtctgagatgggaatctgttacatgtgaagcttccagtcagtggcagatgctgtcaaggaaagacgctggactggacttgcttgctgtgagccatgttttaccgggaatgtgtgaatgaatttccctgctctatcggcttctttgggcttcacgcagtccagtcaccactcttcttagaagaagtggtggaactgtggggccctcttcctatcttcagtctcttgccagggccttgcactggaggcatcctggaggaactggaagctcaggaagccagaggatgccagctgagggacacagaaggcagaggatggggtgggcaggggctaagtgcagagtcaccagttcatttcctagatggatgggggaacagtggcaaaggcagtgagtcaattgtggtatcaatttccttttctgtaaactgtcaatactaaaactcctctccctatataaaaaaaataccagtgtgaatcaactggagttatgcctgaatgtttgtaaaaacttcccacaatgctacgtatctgtcattttttatttttcagttgtttacctatttgctatttgggagagagttttgaggagagcaaaaagcataatctaaaggaatggataaaatactaactttaagagagagaataattgtgttcagcttcttctttgatgtgccacgtggacattttttaaaactgatagcctatataatgattaagtggtgatgctgactgtgagaaagactactagatcactatgttcccaacattttaaaagctcaaatacttcactggtttctcaagtttctctctttctcaagagagagagaatacattccgcctagaaggagggaactggacttgagaggtacacaggatgaatgagtacgaaaggctcccgaggtaagtggccggcgctttatggactctcactggctcacaggtgagaagccctgcagagcggtacctgtatgtgtcctccggtgagccttcaggtgagaactttttgtgtacactttgttgcatccctcaaaatcacatctgtggatacgccgttttctggagtctggggattcagaccgtctctggcgtcttgtgctctcaatactaaatggtgaaattgaactggaaaaagaaaaagtggagttacacggtgagatgcacaccgccccattttggttctggtggcatgggaacattgtctcagacactacagcttcacagactcaaggccaccatgaccacagttcttgctaccactatcttgggcagatctcacttttcgaaacctgaaaggcaggcagcatgagttatttccggcaaaacactccaagggagagaaagacatgcttcaaacaacaataacaaaaactgaaagtaaatgaaagcagtggtaggtgagtatttcctcattatcagaagaaacaatctggtaggggtaaattaccatctcacagttttgaatttctgaatatcctgatagagaatattttaagaaggcttgctatagacaaatgacaaaatgatacatttaataagtaacaagagggtctgcactgcatgtgacaacatagaaactcctgtaaaatcacaaggtacatttctaaacaagggagtcaggctgaaagaaatgacatcagtaacatgaatcatgacaagctatttctgtttggtgaaacgcacctgacatttaacttttctagttggagtttctttgtggtgaggaataacgtgcattgtctttaaagattagctgtaccaccattataaaaaaaagttttaactaagaaatttggccctaacttgcatattgtttaatctgaatgccccagtagaaaaacaggattagtttataatgtcaggtaattgactaacatgtacttaaaaaaatcttaatctcttttgattgagacagaaataatatgactcatcttttttagtaccatgacattctttaaaattacagtgagatatgataaaaaagcagtcactcatatttctactctacaaaatgtactacagttaatattttgacatattttcttccagcttgttcacattttgatgcttttaaaaattagtttttattggtaaatcacctcttttaaaagttgaacattactgataaagatcaattccccccttgttttccaccattatcctggtcctttctcctccttccagggaagagcctctatcctgagttttctttacctctttccaattcttttaaattatgtctacctatacaaatctgcatttacagacattcattttttttgtgtgttttttaagtcatatgaataatatcatgctgtttatatcattctgcaaattgttttattcctttttttaattcaacatttaacatttgagattcatccatgtcgatataaatgccataattcatttatttgaagtgctatatacttataacttaccaattttaagatctatttttaaaatattttaaccatctccaaaatcagaatgcttcttaaaattgatggcttattacagttttactggcataactttttttattagtggtacataaagtaacggtgcattttacaattgaagacattttaacttagatcgggggtcagtgaacttttgctgtaaagggctagatagtaaatattttatttcaacaccgagggccacacagtcttatgttgtagctaatcaattctgcaactgtatcatgaaagcagctatagattatatataaacaaatgaatgtcgttatgttccaatgaaactttgtttacagaaacagtgggctggccaggcacagtggctcaagcctgtaatcccagcactttgggaagctgaggcaggagaactgcttgagcccaagaatctgagaccaacctaggcaagaaggagagaccctatctctacaaaacaaataaacaaaccaaaaaacagtgggctgtattctgtccttgagctgtagcttgccaactatggaattagatgaaacatggcaggagtccagtgaatattcattgccatttcccaagtgacggacatatagactacttgtaatttgcactttcatattgctccagtgaattttttctgaaagtctctttctgcacacgtgtcttcagatttcagtgtaccttctcccttttactaataaattaggcaaacaaagctttctgttaggtaaggtcaaatataaacaacatttatctacctgtgtctcaaacagttttatgcaagatctaccacagtagaatgaaagaacatatgttatgtatggccaagccacttttttcagctttcttatcaatgtggatctgtggttttccacataattgactcacagttgcagggatcggagtctatcgtgaaaggagtcaaaacagtgtgactggcctgcctcatgtaagaacagctgtagttactcctgacaaggtatatttttatcactgggtttgagtcccatgaacaagtaagactgtgtggtgataacagagcaacagtaattcatttctggaatatgtagttatgaaaataaatattgatcttggcacttccttttatttcctgaaaaaaaggaagtcattcatagtgttgtacaatgtttaacatcttttaaaagtgagaaaatgatagagtatttgttttctgcaagttataacttaaagtctataagaacactttgttttgtgtaatattttccacacatgaatataaagaagtctaaatgtaactatgcataaacacacacatacaggtttttgctgagttccattgattttagctatttatcttgctatctgtatataaggagaaacgtaaaaaaaagaaaagccaaccaaaaaaaccctgaaatcagaattcagtcaataatgaatgtttctttagggaccaatgaagtaatcgggcaacacagcccatcaaccacttaaatatagggcaggcagagaaacaaaaacaaaggctacagaaggccatgaaattgcttcactgtgagttctgaatttacatcaaaatgaagacaagtggattgtctataggacctcagccctggttttcctcattctacagtgaaacgtgggccaggtgtggtggctcatgcctgtaatcccagcacgtagggaagctgacacaggtggatcgcttagctcagaagctcaagaccagcctgggccaacatggtgaaactccgtctctaccaaaacacacaaaaattagctggacgtggtggctcacaccagtaatcccagcactttgtgaagctgatgtaggtagatcccttgagctcaggagttcaagaccagccagggcaacatggtgaaaccctgtctctacaaaaacatacaaaaattagctgggcgtggtggcatgtgcctgtagtcccagctacttgggaggctgaggtgagaggattgcttaggctggggaggtggaggttgcagtgagccaagatcatgccactgcactccaatctgggtgaaagagcgagacctgtctcaaaaaaagagttaactgaaatgttttagaacattataaagaacaaatacctaaaggtatctgtacaataaaaataattttttaaaaggatatacgcaatgaatagttgtacccagtaaagctggctttcaaatgacattcaatgggtagattttctccttggttcccctttctaaatggcagagatatcttcagatgtcaaagaatccttggctaagcctatgcctttcagaactgctgatttgatctttttgtggaaaggtaggaaggtaagtgaagctgaggtaacagggaaccagaagtgcagaagaacctgaagaacacaggaaggtgataggacagtccaagctccaagagtgctgcgttgtgttgggatccccagcatatatccacagtcggcgggcactgcaagtggacgacaaccgtggactgggggtttgtctgaaccaagtccatggctggaaaggtgacagtcgagttactggtaccaagtaattttgtatttccagaacctaggacattgtgggcattcaaaaaaaaaaaaaagtttgctaaatagaataaatgaatgcattaagcctggtattcctgatttttaattttataagtaatttattaattcttaattggttaattcttaccaggatactttgattccaagtcttcagacaatgggcactcaattccacactcctacgcccatttccccgagttgctttttttttttgagatagggtcttgctctgtcatctagactggtggcctaggtggcacgatcatagctcactgtaatcttgaactcctggactctagtgatcctccccctcagcctcctgagtagctaggattacaggtacatgccaccatgcctggctaacgttttaattttttgtggagacggggttttgttatgttgcccaggcttatcttgaactcctggcttcacgtgatcctgcctcagtctcccaaagtgctgggattacagacataaaccaccatgcccggccaagtttcatattttcaatgctacacaaagtggctagtgaatatctgggaatctgggtaaccattaaaaacacatagatataaatgtctcaattatttcctctaagttcaagagcagtgtgttctaaagtattgcttacaattaaatttctcagtgggaggccaccgataaatgtgtaggatgctggtgaatgaaataacaaaagtctttcttttgaccctaacaggcatttagataagctggaaaaagtgagagaaagacccttactcctggcaatattatcttgccccatctcactcgagggctgtccataagaaggggtgttaggtaacagaacagctgggtgttttcactctgccttacctatgctttctgagcaacatgccctttgttcagaaggcacctgaagaatcctcacaggtatatgcaacctgacttctgtgcttcaaaaactggcctttttataaagaatgggaatgtgcaagtaactactgcatacaccagtagagcattctttgcataatcattagtaataagcttggtatgatgaaaatggtagaggtaaaacacttgtaactgtgttcccaaatcccgtactaaatatatctgtacagccccaaagaataataactaaaggcccacttctttccccagaaggttagaccatttagagtagtgaatgaacacctgagggggcctcacaggtaccacgttgtaataattagatctagagagaacaaatgagtgaatcatgactttggttgcacaatagtcccacttggaatggcaagttaaattagaattaaacccagagaggctcaaaaagtcacatccaagaacagctctatttaaatggaaggcgccacatggctgccatgaaagaaattagggataactgtaatcagccggtaataaaagaccactcgtcatgtgtgaccttagcatgatgagatgtccttcactgaaactggagtttttacaggagttaaaaaaaaattaaaaaggccaggacaatctttcaagcctggaaagaagacatacacatcccagatttaaaaaccagagcagaaaacactggaattgaaggagctttagtaaattcacacacgcaatcacaacagaattccaagggccacagctgaggataacaatgatatttacagaatgcttagtgggtgtcaggcaccgacctaaatgccttaagcttcagagcaaccctctgagattgacactactatccctgtacactgtatccctcttttacagatgaggaaactgaggcacagagaggttaaggccaaggccaagacaaagtctgcggctacactaaaactcagacctgagtggttgattccagaactcaattttaattacaatgttatgcttattcagatgaagatacaggtattacaaaccaacatatgatagaaggggaaaaagcaacaaaatatctatagcatttaaatttcccctttaacccaattatataaaacaacagcacacataagtgttattgaatatagcctgcaacgataagacatatacttttctctggagaattttaaaaaggtaaaccgttctgtaagtactgtcagatgggcattcagtacacttactattaatctaccaaagaaagtattttcttttctctcctttcatcttgtttttaaaaagagacaagaactcattctgttgcccaagctgcagtgcagtggtagaatcatagctcaccggagcctcaaactcctggactcaaacaatccttccgcctcagcctcctgggaactaggactacaggtgcatgccaccatgcctagttaattttttttttttttggtagagaaagggtcttgctgtgttgtcctagcctgtcttgaactcctggcctcaagtgatcctcccacttcggcgtcccagtgttgggattataggtatgagacactatgcctacccagtacatattttcttaaagttgttataaactatgtatttccaagggaaatgttttttaaaggctgagtttggcagtggtatatgctaatgtcttccttgaccattaatgccacaaaattagtcccttccctgacattccactttatttacaattgtaccaaaaagaattgagttggttgcacgatagaattaccttaagggaagtgggagcattcagtttacaaagtatattttgtactgtttctaaggtttcatattatttaaaataagacattgaacatcacctacagaattctgaattaacttctgccacagaatacctgtaggtagaatgacttctttgttagtgaatcaaacaccaccctgggaatgaatcatcaagaccacaagcagagcaagagtggatgagactttcagttaatcaggatttacataaatctcagtaagacagattctattcacatgaacaagccagatatctgcatttctttgtaggctttcccttaaccagcagatggctctcagaggcaggaatcttcatatttatcttccatactacaacagactctagtgcctgtcaaaccatgtcaatgtctctcctatgatattaattagggaaaaagcagtgtttagatacatttactaccaaatccccagcagctacattcggaggtggagcagattcacaggcatcaagttcctctctcactcctgtctgtagcatttcacagaaaactacttttgaacagattgaaattgtaagattagtagttgccacccttttcagaagctgtgactgagacattatatcatgttctaatttggattcaataaaaacgttttcacaaaatgtataaatcaagagaaatacgtttgctaaaatgcgtcaaaaagctcaatcttaacatctattcaaactagcgtttggcaagttttccatatgaacagaatgcgtctaaaatgcatatttaattattgttttactttaataaacaaagtttcctactaaactaattaaaagataatggtttacaaatgagccttttgggcgcccaaggggtgccctggggatggattcacagtatttcatgattttacttaaatataacagcagccactaagtatttttccacatcactttctagaccgttaaaaaacttaaaagtatgacaagctttctgttctttttgtttcaacatatttcagcaagcaagatcataagctgtattaggcaaaatgtttaaagagaatcaaaatagaaaaaaacgaatcattaacagtctgttctggttggctatattatcaaacttttatgatgaaattagactacaagttgaaagaggattgttggctaacaaaaaaatgcctatttcagatatagagtatctattcaaaatagctactctgtggggaatgtcctatgcattgcgaagactttatcccatgagatcaattaataatgtaggatgaaacgagggttctgaaacaggtatggatttctggattatactagacatacccactgaatggaagacacataacatacttaaatatttagagggattttcccacagaatttcttcagaaaataccggggtttaaattatgttttatgccagaagtgatagcttggtggattacataaaccttaaaaaaaaaaactttctaggtcagaataggattaattattttaatcggaatgccttaagggtaagccctgccctcctcattctggcatgggcccaacccatgccctattgctttatgagaacagcactttatcttatccatgtggctcttgaacacatctgatttggggactctctagaatcatgctaaattttaaaaataagttatccttatttgactacagttaaactttaagctactcaagagtgaagagtcttatacatgtctatttatgtgaccgacaaacatgaaaaaaagctcatcatcactggtcattagagaaatgcaaatcaaaaccacaattagataccatctcatgccagttggaatggcgatcattaaaaagtcaggaaacagatgctggagaggatgcggagaaataggaacactacactgttggtgggagtgcaaattagttcaaccatcggggaagacagtgtggtgattactcaaggatctagaaccagaactaccatttgacccagcaataccatttctgggtatatacccaaaggattataaatcattctactataaagacacatgcacacgttatgtttactgcagctctatttacaatagcagagacttggaaccaacccaaatgcccaccaatgatagactggaaaaagaaaatgtggcacatatacaccatggaatactatgcagccataaaaaaatgagttaatgtcctttgcagggacatgggtgaagctataaaccatcattctcagcaaactaacacaggaacagaaaactgaacactgcatgttctcagtcataagtgggagttgaacaatgagaacacatagacacagggaggggaacatcacacctggggcctgatgtagtacttaagttaacatgaattattgaaagtttttattgcttgggtaggattatataaatcagaccaagtagaactcattggtagttttccacttgagtctgtgttaccagaatgactgtctgaggccacatgtagggatttttctcatcataagatgtccaggtatttgaattctggaggaaaagaaaaatcttcccacctgagacagataatattttacccgcttttgattttgttcctgaaaattttccttactctttgaatactctgtgaaattaacactggaaaagtagagaggtataccaatatgactcaaattcatatcttaaagacatttagaagatgagaaaactaaggctcagaaagattagactaattactgctcgaagctcacacagctaaacaggggcagttagagctaaacagtgggtttcttgacccctagagctaagacttttccgctttccaatgatgttgtagaaagatctgtgtggtacttttacttagtaggaaggaaaatctgcttggcaacactgatattctttctttttacatcagatagttagaactacacacttacgctatttccttttttttgctttggctgctagaaaactcggatacaatagcctaggattggttgtggcttatttgccactctaattataagatttgaaacacaaaactacaaggttttaattttatatagtattttattttttatttttttgagacggagtcttgctctgttgccaagctggagtgcagtggtgcaatctcagctcactgcaacctccacctcctgggttcaagctattctcctgactcagtctcctgagtagctggaactacaggcgcccgccaccacacccagctaatttttgtatgtttagtagagacgggggtttcaccatgttcgccagcatggtcttgatctcttgacctcgtgatctgcctgccttggcctcccaaagtgctgggattacaggcgtgagccatcacgccgggccagtaattttttaaatgtaggtattatgaaatattttctgaactaaggaaacttataatgataaacaagaaaacaaaaacaaaaaaatagaatatgcttctctttaaaatggagaaaactatgtgatagtcaaacctgggttttaatttggagacttctaaagttctgtgatcaataagctcataatatctttaaggaaaaaaaaaaagacaaaataaggattttgatttttgtggtggaagctccttgtactaatagcctcattctcttggtcaaatatcactattccatttataggacttaacatgctaattaaaataacataggacttgtagtctgaaaatacaaacatgaattacagctattataacttgttagctatggtatcttgggcatttaaactcttggagttttagattcccatatttcaaaatgtatttatttatttatttatttatttatttatttatttatttatttattttttgagatggagtttcactcttgttacccaggctggagtgcaatggtgctatctcggctcactgcaacctccacctcctaggtccaagcgattctcctgcctcagcctcccaagtagctggggttacaggcatgtgccaccatgcccagctaattttgtattgtttttagtaaagacggggtttctccatgacctcccaacctcaggtgatccgcccgcctcggcctcccaaagtgctgggattataggcgtgagtaaccgtgcccagcttcaagtgggtttttaatagtaattactgaatggagttttcatgaaaattagtttagagtaaggtaaagctgacccaatgtccaatacatccccagcacttcttaatattatgttccttctttcttttgtggctaataactttactcacacatcatgaagtcatccttataaagtgtacaattcaatggcattcagtacactcatattgttatacaatcattacttctatctgactccaaaacattttcatcaccccaaaagaaaaccccatactcattagcatccattctgccttcctcctagtccttggcaaggactaatctactttctaagaatttgtctattctggacatttaatagaaatggcatcatataatgcatggccttttgtgtctgccttctttcactgagcataaagtcatcagggctcatccacattgtagcatgcatcaatacttcactcattttatagtcaaataatattccatttatggatagatcacatttactttatggacatcacatttagtttatttagttgatggacatttgggttgattccactttttggctattatgaataacactgctataaacattgtgaacagtttttgtgtagacatatgttttcagatctcttggttacatacctaagagtagaattattaggtcatacgataattctatgcttagcattttaaggaattgccagactgtttcctaaagtggttgtaccattttataatttaaccagtattgtgagaaagatccaatttttccacatcctcaccaacgcataatgtcagtctttttaatttcagcaatcctagaggttgtaaagttgtacctcactgtagttttgatgagcatttccctaatgactaatgatgttgagaattttttcctgtgctcatgggccatttgtataccttctctggagaaatgtttgaccatttgtaaactgttttgtttttttattgctgagttgtaagatttctttatatattctggatgcaagtcccttatcagatatataattctcaaatattttgaagttcgatttagttcactttattattttttgtgataaatatttggtgctgtaagatggcttggactaacataaagtctcaaagatttactcctatgttttaagacttttatagctttgactcttacatttagatacatgatcaattgttgagttcatttttgcgtatggtataagaaaggaaggagtccaatttcattcttttgcatggggatattcagttatcccagcaacatttgttgaaaagattattctttcctcagtgaattgtcttgacaccactgacaaaaccaatttaccataaatgtaagggttgattcctggattcttacttctattccatggatttgtctatgtataattatctcagtaccacaatgtcttaattttatagctttaggatcagtttttaaattggaaaacattattcctcccaatttattctcccccctcagattgttctcacataaaattaagaatcatctcatcaatttctttctttttttttttttgagatggagtctcactctgtggcccaggctgcagtgcagtggcgtgatcttggctcactgcaacctccgtctcccgggttcaagtgattctcctgcctcggtctcctgagtacctgggattacagacgtgcaacaccatgcctggctaatttttgtattttagtagagacaaggtttcaccatgttggccaggctggtttcgtactcctgacctcaggtgatccacccgcctcggcctcccaaagtgctgggattacaggcgtgtgccgccgtggccagccatcatcgatttctgtaaaagaaaatgcagctgaaatttggatgaaaaccaaattgtagactgctgccatcttaccaacattatgtctttcaaaccatgaatataggacatctttccgtttaattaaaaaaatttttttaaccatgttttgtagttttcaacgttcaagccttacatatcttttgttaaatatgttcataggtattttcttctttttcatgctattgtaaatgaaatcgttttcttaaattaatttttagattgtccactgttagtatacagaaatgcaatgaatgtttgtttattcatcttgtgtcctgtaaccttgttaaactcatttattagctctaatactttttgggaggcgccctttagatttcctatatacaagatcatgtcaactgcaaatagagatagctttacttcttcctttctaatctacatttctttttcttaattgcctcggctagaatgttgagtgaaagtcctgtatggacatcttgtcttgctactgatcttagggttaggtgctcagtcttctaccattaagtatgttagacatgagtttttcatagatgcattttatctgaggatactgccacctattcctagtgtactgagtgttttcattacaaaaggatgttggattttgtcaaatgccttttctgtgtctatcaagataaacgtggttttctctattaatgtggtgtattacattgatttccacatgtcaaatcagcctcgtttctggggtaagtcccccttctcatggtaggtaatcctttttatatgttgctggactcagtttgcttgtaatttgttgaaggcttttgagtctccacccataagggatactggcatgtagttttcttgtgaggtctttgtctggttttggttattaggataatgctggtatcaaagaataagttagcaagagttctgggcttctcattaaccttgggcttcatggcaccatgtttacactaagatccattccttactatgtcaactgttcccatttgctgatatttgtaacctcagttctgcttttagtccactttggcagagctgctctttattatatttttatgctatcagccctgctcttacctagaacttttcatatcactaaagtttcacggccatgatgtccactgaatacacagacctggcccatccctatttacctgtgaagaaagatcaaacaagaactttgcaagttttaaagtatcatgtgttatttactttcccagattcactcttctgcattattggccacacactgtctaaagttctcaggatctgagcatattgctaggtatttctgttcaaatctcaaagtgaactgtactgtttacaatactctcagtgtatactgtaaaatactgcatggtataataatggcttctatagcaccaaacataagcttagaagattgtcagaaaaagtacttgacagcaggcagggtaggtactgttactggcaatcttacagctgagaaataggtgaggaaagcatagcctggagtggttaattgctaaggaatgataaatctgagagctcttgtctctactcctcttcctacatttcatctttccaaaatcttaaaaatgtcaagatgataatgttaaacctcctgtaccatatttattgatgattaaatattatatgcactgttggttttttaacatggctttttcctgctgagaaaatcagtaacatgagagtagtagattagtagcagtcagctgtgtaggtatttttcatcttaacagtagtgactcaataaaatacaataacaattattttctgtaagttcaccatagggaagcaagtgaacacgcaaaggcatccttagcaacttgataatctagtaaagtgtagaacgtggacagctctccacctcaaatgaatgaaaaatgactcaaatttttgctcaaatctacgacatgtggaagtgtaaagcctccttcccagccccctccaggatgtatgtacatttctgggactttagttctcagaacgaccttggcctctagcatcaagttagcaccttcttcaagagcaccttcttcaaaaactacataaacccatctgagggtctagtaagccctctctccaaagacagatgccgagggactcctggagcttcactatctttgcccggtgctccttctgtctgtaaaatgctcttgactgcctctgtgctgctcactggtctcacccagcctcaggctctttgcatcttgctggggagctctcagctctcttctctgatttcttactccacccccatctcaactgtacgcaaaagaagaacaacagcttcattcctttggcaaaagtataacagctttgccctccaaaaaccttggtggcaggttatatccaggtccctggctaggaagtacgggcagggctcagctcatagtttacctccaagcctttcagagggcacgttttccacaccaagaattttgttctggaggaatctggtgccagctactaagatgacaaaaactccccccaacttattatatatgtaaataataattatatcaggcaaaaaatgatatgtgataaagagaggtgtaatgaagtgttatgggagtcaagggagggggtgtctgattctgtttggaaagtcagggcaagcttaatagaggacaccaacaaataagtcttgaagaatactggtatgtggatgtgtcggtggtaaagagaaggcggaagagagaatttataattatggagataaaatagctcacagttaatcttaataccaaattgtctaacaaacagggttcctaatgggtgggtgggcagaagaggatgatatagggcagacaggatgaccagggccacgtatgacagactgaatgtttccttacaagaagttcaatgtgtaggtcctggaagtgccatgattttgttttgttctgtttcgtttttttagttttagaaggaaaattctggcttatgacagtaagcttccacggtgagaaggtgattaaagtcaaggcctttatcaatcactgagctatctattgccatcactcaagtaagtggagtctacctgaaccaaagtagtgtctttaaatatgaatcagaggggaccaattccaaggaatttcagaagtagaacagtcagttcttggtaactgattggataaccggggataagggcgagagaggagcgaatggtgtccccagcagctgagcatggatggccaggataacatcattagccaacttggagtccacaggaaaagtgccaagataaaagctaatgattaaaattaatctatatgtaaacaatacatttatgtttaaatgacaaccgagtagcactttcatttgctagacaagtaataattaaaaaaatagtagaaactaggtaataaggaagtatttccagaaataacttaaatggattttataaaagaaagctcataaaataaacttaatggtaatggaatttcattaaatgttgtccaatgtgtaattctaaaggccgggtccatggtagaggaaattagacaaaaaaaaaaaaaaaaagcatagtttttgtttattcagtcatttaacattcattaaattcttttagggatattactaagtttatagttggcagtttacatacttgatgacctaggtgattgcttttctgattgtttttaattataggagtttgtttttcaggacctcaaagagatgcacttaagtggagggaaggacaaatggatgaaagaaacaagttctaaagcacaaactgtggccttaggcagcctgctgagtgttttacatatgagaatagcttgaaagagtgaagggactgaaagatgtgagttcaggactatcagaggaagaatcttaccaatgcatttttagctatgtcttagagaaatttaacacctttcctaagctttggtttcttttcctataaaacaatagcatctatactttgtggggttataaaaagaattagggttatgaaaataaaatactttgcgtaaggaggtaaatatttgggaaatgactgcagtaactgctgtttcactttgtgttaactgtaattattaaccctatttttttttttttttttgagagggagttttgctcttgttgcccaggttggagtgcagtggcgtgatctcgactcactgcaacctccacctcccgggttcaagtgattctcctgtcttagcttcctgagtagcaaggattacaggcacccaccaccacacctggctaatttttttttttgtatttttagtagagacggggtttcaccacgttggccatgctggtcgcaaactcctgacctcaggtgatccatccacctcggccccccaaagtgctgggattacaggcatgagccacagtgcctggctgtttaaccccattttacagatgagagagaaatctggggttcagtcatgttaagtaactcacccaagaacacagataataagcagtaagagctgccttatgggtacttgttattccaagcacctgaaacagtggctggcagaggagttgctcaatagatagttgcctaatattaaggaaaaacatctcacatcacacatctgcatacccccttccctcttgacctctcaatgttggaggttccctgagctcagtcctccagccgtttctcctttctgtttcaactcttccttgagtgatcttgctcattcccatgtttcgcatggtgtgtttcatatacctttttgtatgtcactcaaatctatttcaaactctcccttccctgagctccagactcgtatatcttttaggccttccacttgtgtgtcaagcagataactctaacttaacatgcccaaagctgaactagtgatgcttttccccaaacccactcctttcccagttttccctgtctcaggaaataaccacttctctcctggcagtccagaacaaaaacaggggtccctcatgattattctcttctatagcttatacaggacctacaggctcaacctctaaaacgtatctcaaatttgaatacttccatcttcactgccatactcatctcttatctggctacctgctataggatctaactggaatccctgctcccacacccttactccttccccccagtcttttatttgtaattgtaatgaaatatacatagcatgaaatttacccctttaactgtttttaagtgtacaattcagtggcaccaagtacagtcacactattgtgtaaccatcaccaatatttacatgtagagcttcttcatcatcctaacagaaactctgtttccactatatattaactccctgacccctcccttcctttagccctggtaacctctactatattttttgtctctatgaatttgcctactttaggtgcctcatataagtagaatcatacaatattcgtctttttatgtctgtctgtcttatttcacttagcataaagttttcaagattcatccacattgtagcatgtatcagaatttcattgctttctaatgctgacacacacacacgcacgatcatatacacacatgcacactcacacacacactttatccttattcatggatgacagatgggcatctaggttgtctctaccttttggctattgtgaataacgctgttatgaccagtatctgtttgggtccctgcttccaatttttttatacccagaaatggaattgctggattacttgcaattgtatgtttaactttttaaggaatcaccaaactgctgtgcatggctgctgcacccttttacattcccacaagcaaagcacaagggttccaatttttctataccctcactaacacctgttagtttcctctttattaatagccatcctaacagctgtgaagtggtcgctcacagtcttctcaataaaacatatgatgtcctttcaaaaccccagtggtctcctatttcacttagaacaaagcttaaagtctttatcatcacctataaggcgctctaggaaccctgagatctcttcattctgttgagcgtcctctgctccgccacagtggcctcctaactgttctggaacatgtcaaatccatttcaactcagtgccttcactcttgctattcttctgcttagaatagtttctcaccattatcacatggctttggcctaattcatgtctctgaccaaatgtcacttcttcagacatgttcacatctttagatgtcacatctgaagatgttcttcagagaggacattcctagcacccaatctagatagcctctcctgacccctgcaccacagcttctcactgtctattgcttgctttgcttcatataccttatcattcttaacattatatggtatatttatttgttcataatccatctctctcagcagaatgtaagttttatgtggctgggggactttttattcatttttgtgtcccaaatacctaaaacagtgccaagcaaatttaagtactaattattaaaggcaggcaaggttatctgttgatagaggcttaatagtttgagatttttatggtaaagaatcttaacctacttatttttataactttcataatagatggcaaaagattctttgatatctgaaaatatttttaaaatgtcttttcttccttttttgggggggtgggggaaacatgattttgctattatctattggtcagttaaggaaagaaacatccactgatattctgaataatagcaataatatcattaagcatttacttgtgccctgcactgtgctatgaagttaatatacattatgtctgattttcacaaaattatatcgagtgttttcattttgcagataagaaaactaaggctcacgaaaggtacactgcccgagatgacatagcaagtaagtggcaggtcaggaattccaatcaggcactgtctgactccaaaggttattgcttattccacacaccattctgcaagaggtaatactcaacagtttggaggccacagagaattatatcccacaatctctcccttaaggaccatgctggctgggcatagtgacttacacctgtaatctcagcattttgggaggccaaggcgggaggatcacttgagcctagtagttcaagaccagcctgggcaacatagcaagttctcacctctactattaaaaaaaaaaaaaaaaaaaaaagccagctattgtgacacatgcctgtggtcccagtaacttgggaggctgaagcaggaaggtcgtttgagcccagggagtttgaggctgcagtgagctatgattgtgccactgcactccagtctgggtgacagggcaagaccctgtctcaaaagaaagggaacatgctgtttagttagtagtatgacaaagcatttatctacatgtaatttaaaagatatcattcaatacaatggacaacaaaagtcggtgcctccattatgttcatggtaattagagggatttcgaggaagatgtcgccccctaggggctctggtggtcaggaagtcatcctggagggagtgggacttgagccaggtcgtgtcaagtgggaatgggctgagcgaggcacacaggaagtgaagagggtcactccagctgtgggaaccacctgagcattggcctaaaaacaaaaaggagtgagcagcatttggtcaaaaaagggtaaagtgatctacttggaattcacagcttacttctggaggagttgaggaaaaggaagaatggtagctcatcttcatcaagcacttagtaaatgatatcaagcactgtctatttgctatgtaagtattatgtatttaatctgcagaacaactctatgagattgatactactgagttacccacgtcacataaaaactgagtctaagggagagtcaagggtgcacagtgagagataaggatgcataggccaactgggtcaagattttgaatgctgcgaccaagtacttgtctttgccctgtatgcactgattttctttctttctttttctttttttttttacctgcttcaagttttaccatgttttaataataaccagttgtactacccaggtatgacattaaaattctaccagctcctctctcacctatgctatcctgagtaacatggatctaagtatgcttgcatcaagatgaatctcctagtctccactcattctagactgtcactcctaaaccctactaactgaaattccttagtttatgcctctaactcacctcttggttcctccattcaaggacttatctcccagccatcaaaatccacataatgtaattcatttgtagagaaaatgactgtggagtttgagaactgtttcatagatgaatgacattaattaaggatatcatctctagaaagcctggagtttctgtaaattataaactattcatctcaattcagacagttaattatcaacataataaatatttgattcttccagctacctatataaactatagtattttaaaactgtctgactccaagagtcagtaaaataatccctatactagaaaagtcaccaytttatactttctcccccattacttctcataatttccatacaattacctagtatcaggtgatatgtgtctgcatattaaagatcatatygtcaagcaggaactttaatgtatcaccaagcatttgctgtgcttatgtaacaggtaatgcgcaaatgcactcatgatgcatatttcggcttccaaataacaacccagagtttggttgtcagatgggttgcttccatgcagggttaatggggtatgttgtggtcaagtgttcaaacatgtttaacatcatcagtgcaagttcaggtttattcaaagggcaggtaaggtagaaaaatggagtattgatgctcactctgaaagagaatgaccaaaacaaaacccaggggaaaattacatactaataaatatactccaacatatattatggtttctagtttttattcaaaaaatttagagccataaatgaaatattttcttaatttgcagctctcttcattatataccaacttcaaaaatacactgtggttctgatgaaaaagagtacgtaccagtggatttctgagatttctctccctactttccaatctgtgcaatttatttttttcttctttcttcttactagattacctgagggcaacttctgaagccttgattcaaaaagctaatgtgctcagaagcctaacaagtcactatggagcttaatgtattaaatgtgttattggcaatgcaggggaattctattaattttatattttatatcctgccctttcttcagctacaactgtagcctttctttgagtcacaaattaaaaagaattttatctggaatcagatttatttattcttcaaatttacttcactagttactaagaggccttttctcaacattcttcaagggtccttacaaatgagtgtcaacaatgggaaagtgttattttcgtgtaaccctggataagtcatttagcagccctggattccagtctcttcatctgtaaaataagacagtggaactaaatactctttcctgccctttcaggtcctatgatgctgtgattctagtatactaaaatgttttagacaaacactgaagttagatttatcataaaatacctgtgaatcaggtacgaagttcatactaattagaatttaactttccttgattactgggcaattaaaatatactttaatatagaacagcaaggctctgacattttctaatcccatgcatgaatattatggatatgtggaaatatacgaaactgtctcatttaggtatatctaaaagctgattttcacagcaagaagattagctaaagagtatgtacactatcaataagaactaattaagcattttctttagaaaaaaattctctcagagcctttctgaagaagacaagrttggccaattgcactttggcactaatacgtgactgtaaaccaacaacatcaaaatatgtgaagattacattctggcagatgtgagaaacagcttaataattaaaatcaacatagtttaacttccttaaatacacttcattcaacaaacacacacacacacacacacacacatacgtgtgtatatatatatatacacacacatatatgtatgtgtacatatatatatatatatatatatatatatatatacacacacacacatatatatacacacacacatttttttgagacagagtcttgctctgtcacccaggctagagtgcagtggcctgatctcagctcactgcaacctccacctccagggttcaagcgattctcctgcctcagcctcccaagtagctgggattacaggtgcccaccaccacgcctggctaattttttttttttttgtatttttagtagagagggtttcataaagttgatcaggctggtctcgaactcctgacctcaggtgatccacccgcctcagcctcccaaagtgtttggattacaggcataagccaccatacccggcccatcacatatttttaagttcttattctactgtttttccatgtattttgtgaaaaatcgacaagtagtaaaagacactgtctctgatctttcgaatctcaaatctgggtaagtaaatatgtattatgtttggggaaaaacaacaacaaaagtcaggcaaaacccaaatatgagtgactatggagaaattcagatagaatctatgcatgctgagggatgtaacatgaatggtaagattaccctaaaaaggctgtgtaggtgaaatgttataaagaacaaagaccatgataaacatagccacagtgattttcatacaacttccactgatgactgttacttctgaagtgtggactgccggccatctgttgaggtttacagttaaatgcctggtattgcagtcagattaccaggccccacccatctaactgtgccactatggacaagtaacttagggcctcaatgcctcagtttcctttctataaaacggaataaataacgtacttggctgggcgtagtggctcatgcctgtatttccagcactttggaaggccgaggtgggtggatcacttgaagtcagcagtttaagaacagcctggacaacatgatgaaaccctgtctctactaaaaatacaaaaattagccagatgtgttggtgcatgcctgtaatcccactactcgggaggctgaggcaggagaattgcttgaacccacgaggtggaggctacagtgagccgagactgtgccactacactccagactgggtgacagagtgagactctgtctcaaattaataataataataataataataataataataataataaatgtacttgtcttaaagggtgtggaaaggattaaatgagttaacatgcaaagcatctgaagcagtgcctggtaaataccttaacaaatgttttcttaataaatgatttctcactgttccccaattctgggctgggaatatattaaggtattgttgtttacctcaagggaaattgcaaaagggctcaattcagtttttaaaaaatgtatgtcatatagctcatgtaagatgtagaagtgaaggcataaaatcaataaaaaaattaatgagtattatatctccataaaggttgggagtcattgctctggggcagaggctggagaaatgagcatgcccatgtatgtcctttattccactgctgttatctgacattctctagagactctatgcagcactagagtctcctttttttttccttctaattctagggtaagttcacaattgttggccattaatagcttctgaatcgttcttgcatttacatagacatgatgataaataatcagagaaaacattaagctagctttgccaatgataaaaacatttgtaaatttatctgggtttagcacattcttggataattttatcttttaaacaaattgtgtaatttccaattccaaatcacagtttttccttttagcacaaacatattaccttctgaggtgtgttaattaagtgtaacaagaagccttcctagaaagccatgagaaggaactggaccactgtagacagttgtggggtgctatggtctgatgtttatgtcctcccaaaatttcatacattgaaactgtctcatttaggtatgtctgaaagctggttttttaaattttcacagcaagaacacaagttaaaaaataaagtgaaggtattaggaggtgaagcctctgggagatgattaggtcataggggtggagccctcatgagtattagtgcccttataaaagaggctccagagagctgccttgctccttctaccatgtgaagacacagtaggagggtgaggtccatgaaccagaaaagcaggcccttaccagacactgaatctttaggtaccctgatcttggactttgcagcctccagaaccacgacaaataaatttctgttatatgtaagccactcagtctatggcattttgttacagtagttgaaaaagactaagacacagggtaaacctgcttaagcattatcacagaagatgatttaggaataggcatgtcatggatcctttagtttatttttatttttaaatagagatggggtctcactatgttgacaggctggtcttgaacccctagcctcaaatgatccttccatcttggcctctcgaggtgctggggttacagttgtgagccactgcacctggcctagtttttaaaaatgagttcaattcttgatttattttttcaaagcaactatttagactttctttgccaaatgttcttttatctcaagaagcaggaatcagggaaagcattcttccgacaccctctaggagtcctgcggggaaagcattttgtgctctaacatatgtctcagttttggagcctctgtagcatgtcagtgtgtgggcagacttgggaaagtgcagcaagaacagcagagcagtctgctctggcagacagtatcacttacagatgcaaagcccgcccagtgctaacgcagtttacacaccctgaagacagtcctaaaaattccaggagcaaaagcaaaacagaagacacaaaatgagacacagtctcaaagtgctaacggcattttcacataatactttaagtttataataatgactttcatttctataacatcgttctgctgaagagttaaatatcctctaaagacgttttattcatttttaaagttacaattcatcctgacaatgttcccatggaacagaaggaaatttgactgcatcttataggagagaaaacccaaaacccaattagatgaaacacgtcgatgtgatgaggaagcacgactggaaagctcacataagctctgccgtggcaacccacgatgccgcccccatacaagggagcctgccagggttgttccctgaccccgggagagctacaccaacaatgctgtgaagacctacaaaagctttaggttggtaaggtattgctgtggtttcaaaggcttagatgctggtttccttgctaggtaagaaaccttgctttcagatttacaaagaattatggcaaagatttctactgcaatctgccagatcccaactatttttacagttcttaggccaataacacattctctctgaattctataacagtgtttttgaaaccacataccatggaaccttcagagcttcagggtcactcatttgaattatttcaatttcaagtatgttaaggctaatctaagaggattacaaccctcatctctgacttcccatcatgtttatcaatagctcctttggagctattgtttttggaggttgactttacactaacaagttactgctcttatcttttaaaatattctatctacagttaagtttaaaaaaatgttgttttcaaaaaatctccagaaaattgtgagactggttgctcatttatcatttcacaaatatttattgagcacttatgtgcagagtgtagcactaagctcgggggatgcagtcatgagtaaggtggggactatctctactgtcatctgctatgcatacaacaaagatcaccaactgacaagagacttcactttcctgcagtcactcacgttgaccttttacaagaggctgaaaaagcctacggatatggtgagttttaagcccaacctgctgaggagtctcttgttttatggttgttgagcagagtcaacaaagtcaatttaataaaatgcagagtatttagagatataagcaaagggaaaaaaaataaaagcaaagggcagcgcttatttacattttagattcttgtattagatttggagaagattcttgaatatttaaggtgtcctgtagaacatacacttttttttacttaggaaagcagaaaattgtaagaactgaaccaagtctctgaaattacttcctagttttacttcagtcaaacctgagctcaaaatatagagtgtatataaatttcagtctatagctagaggattacaaatagtaattttcctttcattgaactttttggtattcaaatcttaatagttaacaatatttaacagttatagagcaatttaatgttggctagatactacgctaaatactttacatgcgtcattttatttaattcttccaacatctaagatgatggcattatcattcccattttacattccccttccgccctggcccctcccaaatctcatgtccttctcacatttcaaatgtatcattttatttaattcttctaacatctaaggtggtggcattatcatccccattttacagatgagtaaaatagagtttaggcagattaagtagattaagtttgaccttctctttaagatagaggtcacacagtagaaatgttactacatcaaccgcacagtgctgagaagatgaaatggtgggacatatacttttcaaatgagagctcaggtttacaacttgctccttcttttaagaaaatattacagccacaagagaaaataataaactatcccatgaaggacttgatatggctcagcctcccactgctcaaaggaaaggctgttcttcagttctttaatgtcaacctctcattaagtcaggaagagccataggtttgtgttctcttcgggattaaaaaaaaaaaagggagcctttagtctcatccctttcgtagtcttttctcttacataagaaaatcctgtttctgttagttcctccacttaaagcaagagttgccgcaaaggcagctgaaagcagcatgtaacatatcagatggactgaggacatcatgtttatttaacggtagatcctctttcctcagctctgggctgcactctatttccaaacttaggcttggcatatgagaaaactgggagtgaggagttaggcatattcatctatgaataacataatcattacatgtgctaggtggtggtgttattactcacttttacagaatattgacagaggggtttaacattacttctctcaggatcaactcttcttgtatagagagtctaaaattctgctgtctgatcagtgctatcttatataaaataactattgatctgagatcctgaaagcaccgtagaatatggctttgccttaagacttactatacaattacataacaagttgaatgtactagaaattaaggcagggttgggggagtactagaaaaaaacgttctcccattcattaaagttacaaggaaacttctttcaaaatggctcctagaaaacctctgaaaagatatagcatgcatattacattatatgtgtgggtttatgtgtatttatgtagagttggaaaaagctgatccaagaagtagattttaactccgctttggtatcagcatgcttcagaactatttcagaataatcaccttatttttaaaagttctgctcatcagtgagaagaaccaaagttgtggtttctaagaaagttacgcttccaggaaagagagaaaaataaaatgactaagaagtacatggagggctcttatcatttactaattccttgaggcaggattctatttcaagcagtccaggtagaagaaactaatgtatacctttaaaaaagttttgagaagtacttgcaagaactttagtgacctctcctatttatttggaaactcttcttatgtaagaaaagttctacatctacaaatatttttccatacctcaaacagacccaaatgccaagacctatggcatctttgaactaaagttaaataccgctgttaagtctgctttcaaattctccatctacaaataagaattcaagtctgactttgggtagcatggattggattaggagattcactgctaaatttggaatgtgaagatctagatgtgccagggctgttgcaaagtggctttgttccataggacaaataactgaatttctattttggaacttcaatttcatcactgacaaaatggggtcaatactacctattgtgaatgtcscaagggttggttgtgaatttctcatgagggcatggatgaaagggcgttttgaaagggtgagtgtaggtctcctgcaggaggggtcttttcaagataggcctttataaaccctttwggcacgctggtggtaggagcaaaaagcaggtgactggggcctgtgtgatggacatcctggagcctgggtcagctacccagggggtggtctagtaatggggggttgtggggggtggcagcaacagcaaatgaagccagaaaaagcaacacaggaggaactgctatagagccccagggcttcaggagcaggtaggtagacactgaggagcaacgcagggaaggaaagcctgctgcctaggatgagcatgacaaaacgatgctcagcacttgccaaacctgcatcaggacatgaaaaaataaaactgcaaggtgacgtatgcatgtctacgcataggtgagcatacgcatgtctctacattattagggttcattaatttctgatggtggctagttgagtttacctttgatgaaggctagtgtgtcagaaaagaactcaacattcatgcatcctggtgttaaattctgaggccatggttgcactttctagttctacagagccttctagtgttagccagctgcactctttagaccaaggcctgctaatgtaatcagtcacttttatgagtacctaaaattatagctgctaggtacccattaaaataacttatttattcatttattgtttataagaatttgtggttaatgcatccgtattcattgtttaagccgtggttcattaccacacataactgcaggatggggttctgttttgcacatgtgctctttgaccacctggggacataagagaacacatattacaaatgcacatacatttaaagcatatgttttaggtaggaaagaggggacgctactcttatccaattgcaactaaaatcatgacgttgtgaaagagctcactatgaatggagttgtgtcagtagctcagaagtaggctctggttttcctcctccagtgtattaaatcatttgacatttaggtcacctaggatgaggactgaagggcatgctctaaccagtacaattgtaaccatacatatttataaatattaaaggtaattattatccttaaaatatatctaacaaatgtcaacccagattgtgacaaggactgaatttatattttgtaaaagtatcacatgtgataattactgtttttcacacaccaggtcaaaatactaagtgtaaaaagaaaaagaaaatgctcctttgttaacacttgtcattgttctgcacgtatgtaatttctagaatcagaggcctccaaatctattaataatcacaaatttgcaaaagctatgcattatttcagataacaccaagcaaaaatagcaccaagattctaatttcacttaatgatattttcaagatacccaccagtttgaaagcatgcaagtcaagggtataccactaaataactgaatcagtaactgtggaaaaagttaaatgacgtatcatttttacatttcaaggatcgtaatgtcctgcaaaatacgtagtacacaccatctgcatcgggcaaaacgctgtcagatgctttcaaaataggtctctggacccagagagaaatcagcattctaatgacatttcacaacggtgtggcacctggctggtaaagatctacaaaggaaaccaccaaaaaaaaaaaaaaactgtgcattgccacagttagaagtgtgtatatgtacatgtgggcaaacaatgcagggactatattaattcaattatattttggtttcttcatgtgataaaacacactaagagaagtattaaagaggtaaagcaatagatatcgatgtatttaaaacttacaaatgaaatgaaacaaatatgaattttattatctcaaacaaggctaactcccagggccaacatatgatgtaatatctaaatatgttaaattggtgaggaatagaaagaccaacctgtgacaaagaggcaatgctgtctttataaaagtctgttaacacacagccgcaacataactttactaactcattcaccatagcttgaattctcttccaaagacagagctcctttagatacctttatattctttatatatttatatttacatatgccgttatattctcctttagatacctttatattcttccaaagacagagctccttttagatacctttatattaattctgagcattactatactgcctggcacctagtaggtgctcaaaatatgtcagactttcaattagctcattattttaattgagtgaagtttgataagagtcttaaaacattctattttatttaaattttgtgtatctttctaaaaaaattaagagtgatttaattatggagttgaaactagaagaattagcatatttcagtttaaagccatgcccctccctccctccttttttttttttttttttttgagatggagtctcttgctctgtcgcccaggctggagtgcaatggcacaatcttggctcactgcaacctctgcctccctggttcaggtgattctcctgcctcagtctcccaattagctgagattacaggtgtgtaccaccacacctggctaatttttttgtatttttagtagagatgggatttcaccatgttggtcaggctggtctcgaactcctgacctcaagtgatccacctgcctcagcctcctaaagtattgggattacaggtatgagccactactcctggcattttctttctttcttccttcaaatatttactgagtgtctactatgggccagaccttatggtaggtgctggagacttatagtctaagagaggcacacatacttccttacatgcacacaattgagggccatgacaaaaagacatggcagggatccagaggaggaatgaagaacccaggctgccatcagcaaagaggtgagtgttttagctacggagaaggctgttatcaagggagaatatgcaaaaggaaatgaaactttgaagaacatgaacatttaaagggtaggtaaaggaaaaggactgaatgagaaggacgcagtagatatgtcaaggttagcttagttatatcatattggggaattgagttaacctagctctcaaattgtattatctattaaagggtcaaagtacattttagctagtagattacataattaatgttagctatgtattagtcatggctgtacataaatgagtcttgcatccccttgtaataatagtcaacacttatttattgcgtttggtaaatactgtcctttgagctttatatgtaatatagtgcatttaatcctcatgataaccatgaaacaggtattattagcaagccccattttacagattaggaaccagagactcagagatataaaataacttgctcgaagttacagagttaatatatagtaactgaaatatgaaaataggcagtctgatttattgatccctactctattctttctcttttcattttaaagattaaaataaaactgtttttcaagacatgtcacagaatgggtctgagaaataaataaaatggtatctatgaactgtgtgaaaactgtgaaaagcttaagaatgtaaaatatcattgaaaggtggttctaacaaagtacaatgtccatttctggtgaaaactgacttcattgtttccactggagggaagtgttgaaaacgatgaatttgtggagaatcactttggagactcgcctctatcaccagaggatgaattatttaccaccaatataaccaggcacacctgggagcaaattactgattccagggcccatttgtaatcccatatcagattcctttgtcacacagaagacaaagtcggactgaagtgatgtttaagttttaagggagctgatatcagaagttggtattttaataaaaataatattatatatgatccttgtctgtccagacctttaatctgaattaacagttatggactgaatgtctgtgtcccccaaaattcacacgttgaagccataatcctcaatgcaatggtatctggagatggggcctttggggattatttagatcaggtcatgagggtggtggggcccttaggatgggattagtgtacttttataagaagaggaagaaagatcaaagttctcttctctctccactttttgaggacatagagaaaaggtgcactctgctagccagcaagaaagccttccccgggaactgaatcaccagatggcttgctgttggacttcccagcctccagaactgtgagaaatagtcctgtggttttagccacacaatctatggtatttttttaatggcaggccaagttatgccaaatacatttaaattttaatatgtggagctctgggagatatatttttgttgtatattaccacagaggaaatgatagtgaagagtttgatgatttgcttaacgccaaaagccaacagcaggtagaatttgaatctgcatcctttgattccaaagctgtgctctttccattgagttgtttggactcctgttctttatatttattcaccccatgtcagttttaaaggccttggaaaagttactagagaataaaagcctatacattcagtacttcagaggccacatctccctctgtggccaattaacactcgatttactttgatggtcatttcctatagagtacctatgttcagttttttatcattagaaggcccttttcagtgtgtgttctaagaccacgggccctcagcttgctacaatcctaggggaggcccagcttctcagccctcagaaagataaatggtttacctctttataccaacatggattgacactttgcacaatgccacttaaaattcagtacctgctgattcagctaagagattaaaaagaaaaaaagatatttattctttgttcatatgaaaatgtcgtatgcattaatcccattaaacaacagagcctgcatttaaatctcattctaaatcctatttccagagttttaatgtttgaaggtgtttgtgtcttcaaaggtgtgacaattaaaactaaaagactgatcttcaaattcattaacatacacaagagacaaaaagccaacaaattagcacagccaaaggaaaaagatttttaaaaaaatagccacacaaagcccatccagggggtgatgcttttttattggactaattgcaaggaaatataaaagggtaagcttttactaatcaagctcttttcactcagccatgaagaactgctaggcagagcaagcaaagagacagggtgttaatgtaagcctgataattaaattcaggatcaagtggatcagagggaaggccaaaaacgtaaaaatcaggtggaggtaagaattagaatcccaatcttttataatactatatggattgtcgaaagaagaagagaaaggaaacttatgaaagttggttttttctttctaaagcatgaataaaagtggttatatttaaaagaaaagtgaacagtgacaatactgcagaggtattttgtagcatcctgccttctgtgacataaagctctttcctacatactcatctccatttattttcacataatccctgtggaaagaaacaggcaagatcaggcataagggactcaatcttgccccagatcacataattagagagtgacagaacaggtctaaaatcttagcttctgaaattcaggtcagtagtcaccattattcttcaaacattttgtcaggcataacaacgataaacagagaaagggcagaaatgatgtaaccaatgtttaaagatgtctgtaatgtgaaaatatgtcttgctatcctctgaatttgagtatttctacttttctgaaaatattgactaaggaatgggaaacagccatcaaaatgtggaaagggaaccaccaaagtcaggcggcagaagttctaagttctaatcctagctcctgtgcaaatttggacaaaatcattcaaactccgggcttcagttttcctaccaatagatgaggatagtggaagagatgtcttcatttcactgatcaatatgccttgaacctgctgccacatgtgctgtgcttggagccaggcaaggacagccttcatactggagggcctcaggcttgaggagaaggtggaaagaacattacacacgggccaacaaatacagtaaatcatgataaaagtgatgctatgctccatatggtggcattggatcagagaggaagaagaggctgatgggtggggggactgcagggaagtcttcacagaaaagcatttttcaatttaattttaagttctggggtacatgtgcaggacatgcaggtttgttacataggtaaatgtgtaccatggtgattagctgcacctatcaacccatcacctaggtattacgcccagaatgcattagctatttttttcctgatgcagaagaacatttttaaactgagtttttgagaattagtttccttggtgatcaagctgttttgggaaatgtaacaagttcagtgtggctgaaatttagggtccacgggaagatggaaacaatttgtgagaagtgagatggaaagagttatgtgatgcaaagggcctcatacgtagtgttaagggctttggacttctaaatcatggcacactaccacagagttgtaaagacaggagcaatcccatttgcattttataataatcactgtaggcatggcaatgattggattcagaggaggagtagaaagaagtgaatctagaattccatggtgtatatgtgatacattttctttatccaatcatccgctgatagacacttaggttgattccatgactttactattgtgaatagtgctgtgataaacaaatgagtgcaggtatctttttgatataatgatttcttttcctttgggtagatacccattaatgagacccctggatcaaatggtagttatatttttagctctttgagaaatgttcgtactgttttccatagaggctgtattaatttacattcccaccaacagtgtataggtgttcctttttctctgcatccttgccaacatctgttgactttttaataatagccattctgactggtgtaagatggaatctaaacagacctgttcggagcttagggtaatgtttcaggcaagagatgatgagggcatgtggggtgaggaagagccaacactgccaagcaatatttaggaggaggaatgctggactcatttgatcaaataaatgtgggttatgacagagttggagttaccatgaggtttctagcttgggtgattttgtagacgaggaatgagaagactgaggttagggaatatgaacagatagaataaatggctcttccaatgctaaagtcttcttgtggaagaaagacatcagggtacttggtgttttgggaaaatgggccctcatatattaagacgtatttattcagttgaagtcagatatctcacagagcagtccggggctggacatctactgggggtaagtggcatcattttacaatgggctgctgacagcatgtgcacgtggggtgaagaaattggctgaaacttacagggtcctttgtaccctgaggacacacacaggcagccttagatacattcatacagcttctgtccagtttacctatggatttattttattttttattttttactttttgagacagagtgtcactctgttgcccaggctggagtgctcactgcaaactctgcctcctgggttcaagtgattctcctgcctcggcctcctaagtagctgggagtgcaggcaaatgccactgcactcagctaatttttgtattttttgtagagatggggttttgtcatgctggccaggctggtcttgaactcctgagctcaagagatccatctgcattggcctcccaaagtgttgggattacaggcatgagccatcatgcccagccacctattaatatttgtggctcatccactgtacatttttacagcctttagttaatggtttgcaggcatttttaccttcggattttcttcatctcaagaactgttctgtcccttaacatcaaatagacacacccacaccacacacatgcaccctgtggtaactatcatttatatgccaatggcacctacctttacatctacggacttgccttctgctctaaattcccaaccacaaccaccagttgctcacactaaaactaggtgtcatccttgattcttctcttcatttccttccataagcaactgctgtttacagttttcagaacgcatcctagttgcatccacttctctccttctgtggataccattctagtcgtggctagcatgtctttctcctcagccacagccttggcttcctcactcattcccctgctcccttccacatatatatttttttttttttgacacagagtcttgctctgtcacccaggtgtggcacgatctcagctcactgtaacctctgcctcccgggttcaagcaattctcctgcctcagcctcctaggtagctgggattacaggtgcccgccaccatcattatgtatttttttgtaaaaaatacaaaaattagtactggctaatttttgtattttttagtagagatggggtttcactgtattgaccaggctggtctcttactcctgaccttgtgatcgacccgccttggcctcccaaagtgctgggattacaggtgtgagccaccatgcccagcctccttccacactcttacagccctttctccaacaagctgccagactaagcctgaaacataagactccaccacttcactctcctgctcaaagtcatccgcggtccccgtcccacccagactgcggactacatgtttctgctcccaccgacctctctgagctgaggttgtttcacgcttcccctcattcacttttcgttccttgaatgtccatgtttgttcccatctgaaggcctttgtgtgagctgtttctagcacctggaataatgtgcccagaccctcacccagatggttccttcctgtcattcagctcccagatgccaagtcacctcctttcaagaggcattttctggccaaaccccttggattgctttctagtcatctccaatcatatcctcattacattttcatcaaggcacttatcactaccagatgctagccagttgtcactcttgctccactacatggtaagaagtgggggccgcatttgtcttattaaatactgtgcccctagagcacagaaagtggctggatcattgcaggcacaataattttactgaagagggaacagatgaatgaacacaaatattctggaaaagtgataatgctaccaagtgtaaaaaaaaaaaaaaagtcaatctctggcaatttcaaaagatgatcaggtttgtaagtgacatagaacttaaatacttaaattaaggattaaaattaaatacaggctaggagaaaataaagaagacaagcaagtaaaggcccacatggaagctaggcagagaaggggctcgactaatgcattctaaggaagcagaagggtgtaagatagacaaggaacactctgattgcgatcctccctttctaaaaggtgttgcttggatcttcttgtatttttttggagcccttttctccttgaaagccatcatcaatagcattcaatcaagcctcccactcaggagaggagagagaggcagacatggaaactcacacacatattctcttcatattttctcacctttctatgccaatatgttttcctttaatgctcctggaggtacccttcacatagaatacgatgtgaatagtgccccctggggttgtgcaatatgggtgtcctgaaaagagagagtagcaagccaaatgtggcagcaccaaatttcttgctacccaggcttctttccatttaaaaaaatgctctgacaattttttaaaatgttagggctacatctaatcaattcctaacactcaaaatgaaaacaggctcaattgcatattgttctggagactggtgctgctacgtttgtttttaggtcttggcataacttaggagagtcccagggtcctttcctctgactggtgtgcccgggacccttgcctctcatcacgcaggcctctcctgctgctggccctctcctgggagaaaggaaaagagcatcagccacacaatttgatgagatctgtagtttagtggtgcttctgagagtatatttgaaaaaagatagccaagactgcggaaarcacattctctattagccatggtaatgatgacttccaaataactgagattatattgtacaggatgaagactttcaataacttaagttattatgaccagtaacaaggctactgctggcaaaaaatgcaaaaacccacccaggtcaccaaaatctcatgaggaatatggagacactactaatggggagtgaagggagatggaataaatctcgtctcacctagaggcagaaactaagtcacttggctgcatttcagtttaggattacattacatcaatgtctactcaagaatttttgagtattcacagcacattctcaaaatttaccaacttttacctctaggtggcagcaactttcctctgttcttcacatggttgcctttagcctttgtctcctacctttaatacaattccatacttccttgtctttcacaaataaatgccttatggactgtgcagtttggggaagattactgtaagtcactttcactgtaagaaatcagtccattcttcagttaagctacaaggttcttcaaagagtacaatataattcagatctaaagcgaaaaataataggtatacccttttctttctccatacctataaactgcaaactctcagaaaagcagcgtttctttttcttttcagacctctgaggaaaaaaggcaatgagtacaggaatggaaaaagagatggaattggagagatttctattttacaaaaatatcaatttaatcctatgatatatccatttatgagggtgttccaaatacattacaggatggaagagaagatttaaagaatcacaaaaacatggtaacatacaagtacatatttatgtaatgtattgaactgcagtcctacctaaatataccctctagctcagaattctcaactgttaggtttaggaaaggctcgagagacctgaaggaaattatagccttgtttacccaatgctgggcatgtcaatgaatgtcctaggtggtagtaagagattccttttacataaagttgaaatttgattgtgggctaatacttagggttgacaaagcactttctctctttttttttttatttcaatgggtttttggagaacaggtagtgtttggctacataaataagttatttggtggtgatttctgagattttggtgcacccatcacctgagcagtgtacactgtaccctcaccacccccccaaccctttcccccaagtccccaaagtccattctatgattcttatgcttttgcgtcctcatagcttagctgccacttatgagtgagaacatacgatgtttggttttccattcctgagttacttcacttagaataatggtctccttttacattcagattgctgcaaatgctattgtttcattcctttttatggctgagcagccttccatactgtatatatacaccacattttctttatccgcttgttgactgatgggcatttgggctggttgcatatttttgcaattgcaaactgtgaagcactttctttcaaggtgatgctatgaagagtcttacctcttggggattctttcaagacctaatttgaatagtctgggtcagatatcatttatttattgatttaagataaatataaatattatttatcttaaagagccataaagactaatttagcataagtgagaaatttataccagaacccagcttgtagatcaaagctttatgcatttcataggcagttcctctgttttctgcctatcgtatatgtgatatcgcaataactacgtatgtttggttttaaaggctgcatttttaaatatgtgatgccaagtagggttttagagaaatgaaggttcaaagtgattaagatcaacactcttaggtttcaaggagaatgstgtctattttgactgaacatccttcatacattttggctactcgataactaagagtaagaccaaggagaaaggacctagtaactaatgatagagtgctttcactttctaaaacgtaaggcattacgaccttatggaaagcgttaaagcttgtcatggaaaagctactacccttacgagagctttcaggtaatttaaaggtagggcaaattgatggttctaatttataaagagtagtctttcccatcattttttggtactaacacttttcctttgggaaactactcccacctcatctcatctttgtaggattgtaaccaagggctgggcacctaacccaggaccaatcatactctagcttcctctattgtgattattgaggaggtgacacagaggaactagagctgacccctcccaggcctgtacctgctgattaaatcttgctccctggaccctgggtgctgtcctggctcctgtgtttcctgaggcccagatcctcttctttacttttgtctccatataacctaccttatgtcctgaaaaatcaccttttgcttaaggcagccatattcagttagtttccattacttccaacaaaagaaccccatctatacagcatacattatttgggtgatggatactctaaaagccctgacttcacctacacaatcctatgcatgtaacaaaattacacttgtatctcataaatttacacaaaaaaagaacttcatctgataaaagggactaaactaaatgaatatttagacagagataacagccacaagtagacagtggatttcagcagggtcctcagccccttagctattagttagctgagggcttatgtaaaacagctgtgacaaaacctgtgtgattctgagttggtttaaatcttttttataaatacgttgcacgctatctattgctctcttaaaactaatttaaagaaatgtattattaggatactggtcttaccttaggcaaatcttgtactatgccaagaaatgtaataaatagctagtttcagggaaattactaagaaactttatgaagatctggtggtcaactgagaaaaattatattgaggtaagaatatgtttgattttaaaattgctagttcactgtccatgtgtatacggagaaatctctgtagctagaaagatgacattgcaaatgtgaccagcagatgaaaaccagaacaaaactgctggcacatggagcattcctgcagggaaccccttaagatttattatcctgagcagtatttccagcaaatgcatgaacacattcagatttttgattgggttccaattttagtcattattctttcaaatgcatatttagaagacagccatggattataattgatagccaattttttcagcccaaatatatccactgaaaaatactatgaaagatgaagaaaggatgtggcttctttctatatatatgaaataaaatccttcttcattttaagttgatatgttaattaaacatggttggtactggttctatcacagatacatatattttttcatattgagacacagtctttttttctgtatcagtcatttatgactccccacattcccttcttcatgtttcattatgacatgaccattgctttgagttttaatttttcttttttttagagacaggggttggtcttgctatgttgcctgggctggtcttgaactcctgggctcaagggatcctcctgcctcagtctctcaagtctctgggattacaggaaccggtctactgcacccagctattttaaagttctacatctggacaactttaaaaggaagaggtttgggatggagaataacccacatcatacaatttaaacccctataagaagcagtagtttaagcagctttgctagagtaaatcatgatttcagactgtgtgaattttaaatttcctctgctgtataaaaccactgtaagaacaaaaatagacaacaatagactacaaaccccagaattacaaagttgtttggaattgttaacaatattgcctgttcatgctgtaattagttagtatgacggagatgttttattacatgatagcaccacacctgggtacagtgttgggaagataccaggaatcaacaaagagtacaatgacatgtcttatgggttcacatgttaggtttccagtacaatattaatatggttctgagccgcaggttgataaactattcctgggtttttaatatgaaaatgtctcagaagtggttacctttatggcctcagcatgatcttacagccttaattctcctataattagggaaataattacagaaaattatctactttaatttttttcccttatatcatctttactgttactaaagaaatactagagacaaaatcagctgataccagcaggaatatagaaactacttttatcatgaatctctcttgctgaaattctgggtgatagagaagttaagaaaattaggccaaagttctttcatacggtcactttggaagacagaacataagtctgaagtgtaagtaactgtccccaagctaaatttgaggaggtaaagtcattaaagaaattaataggtgatactgcattatagcmaagaaaagatgagaatttggagggatttaaaatgtaacaccaccctgcaggcacttctttttattgtaattcagcacatatacagagaacttgcaagcaggttaacgatgacatcaactatggcccattttccaaatctcctatcaaactttggagacagcatgcttccaaaccaaacctaaaggtaaccttctgtgacttatttgccaacacgcatggcttaaaaagaccatgaaggctttgcattcttggaactggaatttccacatattaaagtccatgcataatataatttttgctctgtaagtcaagaagcaaggcagtgaaatactctagtaattaaaattaaaaaatcaatattatctataaataatgagcatgcaaggatctgtaagatgatgagtaaacattttggcagggagtaagtgccacatactggtgtgaggagcaacgtcttcattaagcttctcctatttctccttgctctcccatcccatcaatctaatgggaatttcccaggcaaaagccttctgcttagcttgtaatgaattaaacattcacatttctcttgctctctgcacaggtggacaactgccacgtcatggaaagactactggatacgcatgcagaggcctggatgaacaggcacagagaggcttggatttatgcctaggtttggcatgtaacgtttttgtctgggggcctccatttgtaaggtaaggaggttgaactgcgcttgatgatgcttgcatttcctttatagccttgaagttggtaatttggaaatgctctgtccctcctcaaaagactgttctacattagatttctgagagatttccaatatctacaacttcagtgccttcctctgttaaggaaaaaggtttaagcaagaaagaatgttctcatttttatgacaaaactctccaagttatatccctcaaaaagattccatgaagtcatgtctaacatttgcaactgcatgaatataaatatttaagttcactgtagcaccatacatccacactaaaacattgaagtgtgaaaaggctcttcctgccctccacaaaaatttgtgacacagaactttttcacacccaaatgtgaaaaatgattcacacccggaatgcatcataatttgcatagagacctcattaacactggagactttttgtgtatatagctacataaaatcttaggcacattagtaataaataaataataatagagactggtagtggcagcatccaattggttagagaaaactacaaaattacttctattttactaatgacaattcctacatatatagttttttcacagagtcttgctctgttgcccaggctggaatgaggtggcacaatcatacctcactgtagccttgaattcctgggctcaaggctcctgcttcagcctcctgagtagctaggactacaggtgcataccatcacgcctggctaattttaaaaggaaataaaaaatagtgagctggcgtctcactatgttgcccagctggtcttaaactcctgggctcaggcaattcttcagcttcagcctcccaaagtgctgggatcacaggtgtgagccaccacatttggccaatgattactattaataacgctgtatttcctatgttatcatacaaatagcccataaagtttgtattatgtgactcccactaccactgttacacaacagcccttgatactggttttaggtacacagcacaatcactaccgccaccattatcaagcaacgacacatgcccaagtcctttaaaaccttaaaaatggagcaggatagagcaagaagtggagaggaaaaaagaaagtgaaaatctaaagatggagcatacataaatgtgcacgtctttagaatatgaacatggattctggaaatttctggagccttaagtcaactgcaataattggttcacagatatttcccactaaacaccaccctgtcctatgccagcctacacagacacaccaaaatgtagcttaaagatttctgttatatctttaggaataaaacagctgaatatgacctggaaacagctgctctcctgtgggtctgatattaggatataatcatttcaattaaaaagatctgccaagaataaaagtctatcttcacattcaactctctaataagaattttccacatttggctcaaatgcagaaaaatagattttttctggcattactgtatgcaagaaagagtggcaaatmttctaaaaatggtttataatgtgaagggtagtagaatatgccacttcaaaatttgccacttcagcctaagaattattatgagctacaggcaatgaaaaaggaggagacacaagaaaaagtctctgctctccttctttctaccaggaagggcaaggcaattcttaatcactggagacaactctcctgtatcaacccagagatggcatcagaggaatctgcacaacacatctcattatcccttatttcccattagtttctcccgcttatttaccttcctacaattgcacgcccttgaagctcaaaatccttttcctctgtctttttcacttctctaaaaaactgtctttttgttgttgttgttgctaagatgctctaaaggtccaagctctaaccacccctctgggttactcatgcccatgtgtgtatgtaaatacacatgttaataaacttctgctcatttttctttgttaatctgtcttttgtcagtttaatttacagggccccagccaataaacctaagatgggtagaaggaaaagaggtttttacttccctaccacagtcactggagaaaggaaggcatgctcacttccatttagggacaagggtgaaggtaaagaggagcggtctgatgaaatagagaatgaaattcacacgaccaaaccccaaaggcttcatcaatcttcaaatcagtaaatgttcctagtgcatggtggtactgaggggacaaactttctgatgaacagagtttatgtctggcctggcttgctacctttaattaattcaatactaaatgagttgtacaatgatctggtatttgttattggggtgctaatatacccgcaagaagttcttattgccattctttaatcccttggagttagcaggcagttatagcaagcctgaatccactccaacatatgtcgttgggcctcttaggccctggcactctcgtttcctccctgggtatgtacaatattaccacactttcaattccagtggattttgtttgccttatacagatattctttttcttcagctccagaggaaatgttcccagatgaacaaggccagcagatgctgcctctcgtaacaatatcatgcaaagaaaaatgctagttaaaagtttaaaccatcttaactcaataataaacactggtttgggaactcaacaacagccataggctttcccaacctactgattttcataccttacctatacataccttaatagtgttaagttggaggcttttcttcttttcctgaactttaattacttatttgatgaacacaattttttaattgattggggtatttgctaagctaccttcacaaaaatcactgttcctaattctcaaatacagtgtttgcgggttgaacccaagccagagccaagctagtgttgaacttgacatgtaatcctacaaattacccagttgatagatgggggacagcaactatcactttcccttcctcttcattgccagcgtgagtctttaaactttctgaattttcagggccaatatttcactaagaaataacaagtgtttatcactttactagaagtacaggctgggtgattcatggggcttcttcctagccaggtgatttatttccatatactagactcacagtatttacctaaggaagattcaaggtagtatatatcatagaaatcttagctagcttatgaccaaataacgtacacgtattaaatccatgtatgctcctactagagtcaatttggaaatatctccaggtctttctatgcgtgcatcaatctataaaggaaacactagctcaactctgcttttcttactaattctaggtctttgctcaaaagctttcttctttgggatggattttctgacagccttgttccttcctttatattccaccccctcccaagtatgaactctcaaattagtcttaaataaagctgctaacttctccttctaaacattatattataaatatatctccttagagctttacccacattgtatattatgtgcttgtgtgatatcgtatatgtgcctgtgtatgtgacatcacacacacatacacatacacatctgccctgcaagacaggtaggcccttgaggatagaaaccatgttttatttatctttctaatctagtgcttcttacagtgcctgggactgtaaataaatgttgctgaataaataaaagttgaattttctcaaggccagtagtaaacatcacttttgttttccatggattacttctctggagatacaagaggtttacacttactaaacaaataacatgctatgaattatgcaggaacatcattacttcaatacttcagagaggaaaagtcaagaaaagaaactctgttatttactccatgttttacatttagccattgagaaccaagttatggaaactggatctcatacctgacaactctgtactctacccattagcttgtggcgtgtgataagtcaagaacagacctgatttgtccctttcctttcacataatgatcatcatattattactcccttagcttttcaggccggacaggggataacatgctttagcaatggtaagagacgaggaaggatgccccggctctgaggcaaggtgtaagcaaacgcctctgtgccccatttccccctctgtgaaaaagaaaagcacaatatttaacaacatcgccaagctattgtgagaattaattagatttcgtgggggaagggaggtgagatgattaggcatgattcaaattcaaagtgtcattattttgtgtctaaaaataatcttgatttaggaataaaattaatttggaagctcaatctttggtgatcatcttcccatacttaaaaaaaggcatagttttaatcaaaatctcattctaactataattcaatgaagtaaaaatggaatttccattcatctttgaagtaatacagccacagttcatttttttctttttagtttttcttttttttccttaataacacattatgtgttaaaaggttaactttgtggaatggagtaatataaacaaatacagatattgagcccactttttttgttgtttcgcatgaaatatttgtgaaacactttaaatcgcttctctaaagaatcgataagctatgttttctggttgaaataacttttcaggttgtttctgcaaaattccatctatatttttgttcaagaactcatcagttaaagaagatcttagtactccccaaattaaaaaaaaaaaaaatcctggatatttaaggctatggcaaggaaaaaaaaaatcactgagttcgttgtaatccccaaaactaatgtaacagattcattaactgtggaaatcttcatgaggagttgaagttggtatctgagaaatatctgggtctatgtaccttcgaaaaaaaggaaaacattctttaaaataggtaagagtttataatcttgggaacttagatcatatctgtcaaaaaaaaaagttacactcagggtttttggtgaatgaagagtttgggctggaaaggaactctatcaatatttatttcgaactgtccagaggaaaggaagaccgcatagtccagttagcaggtatgtactctgtatagagaagtaggactaattctcttaattttaacataagccctattaaagtttcccgtaagacctacaaatactcatattagactgtatactcaccaaggaaacttttgattattcattcgattkccccggacccttgatactggggacggatgtaccctgtagacagagaagaataatccagtcattgaaaaagcatattcccaattgcaaatttaaaaaaatggcatgttttataaataatttcttttagaattgcttaatacaaaatccccagaacttgaacccctcttagtaaatgatgcaattaaattcctacgcctgcaaatctgtggtccttttttccttcttaaccactctcaagacaacaggtctgtcataatgttcactctgaagactcccagaggcaggactgatgcattcattcagtccaacaaaagtgactgaatacctaacccttgccaggtacaagggtgggtaaaagttatctaaggtatggtgcctgagttcagtgagccctctttgtacctgttcccatgagggtgggcacaaagaggtgtctaagtgccctctccttcactctaccacatttaaaactctaggaagcaaacaacgttattcaaatgtgctgtgacagaatctgcaggcacagggaaggaaggaagggtgaacaggtactcctaggaggagtacattctggaagtgatgtgctacactggactttgaagaaagtaaagtcaattcaaaattttagccagataaaggagaagtgaagaatatattgctttccaagcttccaggattggacttatccactggaaacagcttaaagcttccgggaactgctgttatcttctaatcaaagcctagctagtaaacctccgcctctttgtgggtcactaaccggcaaaacaatacgccctacttccggctgccagcttcctgttatggtctgtctttagccaggatttgtgagatccaagcagtcttagcttgtattaccttcaccctttatgcttcatacattgctcttatttacaagaaaaaaaatggggatataaaactggtcttaaagtccagttagaaccaaggtttgtaagaaacccagttctctgtagttgtttaataagtgaaaatcattccaaaacagataatgcagttccagccccgcctaagggccaactgcagtctttccctaaacccagagccagactgcactttgcactcggaaggcttatttcttccaacatcccttattaacattcttttcctcacagcgcttctcaatggctgctgcagctgagctgctcagcacagattttctgctcggcatgggggagggggtgttaattatgcagaaagatggagagaggccagacagcccctctggtgaactgtctcattcaagcacggcccacttcctgctgttttgcagctacaaggatcacctgttggtctcggcgtccagccaaactggggcctagtggaaatgacagactcagctagaaatgaaagccagttcataatccagtatcctaaattggacaaagagggggaaaacgcaataatagtacataaaaattatacgaaaggcagcaagcgtaattttttcctcttttattcttttacttttttactttctgtctgcttgaaatacaatccttaaaatggatatttgagccaaaaaagttctccccagttaaagccccctgacctaagaggaagtgcaggaaattctcctgaactttccctataccctcactggggtatcagaatcctaactatttaaataaagtttaatcagccccaaatactcacagttctttaatttgttctctatcttttacacatttactttttatattgtcccctccttaaccctaggagtacaaagaaactatttcatcatgaaaattccactgggtgaagtttaatgacagaagtattctcttattgatgctgtttattgcatatattagtgaagaaaaagagagtctgtttaatccataattacaacattgtctaggtatttgtatcttttaggaaaatttcactgatccatagatcaaatactgcaaatggagaatttctataatggtttagcagtctcaggaaaagaattccttaggaaagtctttggaaaagaagtcctgattgtgtatatgaacaaataattacaaggtttcctaaattaaaaaggtaaatcaacaaagctttatttctgtcctcaaagggaataagtacactgataacttggcacatacttcatctgataaagtagaccataagccttgcacttcaccaaccccctatatattatttcttcaaaaggatatggcatgtttttttgagctcagtctttaacctgtgacactttttgccatcttctgccttctttccacatatagaagccaggcaggtagcaacgtcaaaacctctgtaggagaaaccaccacctaatctgcatgtcatgcattattcatgacctcctgattcttgcacctgcatctaggcaggaagcttgcagggaatgttcattattcttcccttagcctcacacaggctcgattactgctaagccactttgttctgtaactaaggggttcaggccttagtactaactgctggatgtggaaagaaaaaacaccacgctgaacaaaagggcaatcttggttgttgtgtaacatgtattgaatgtgctcttctgagactgacagtttgtcaggtagaaatgctcacatttggtgatttacattacatagaaaacagggaagctataccattagggccatgtgtaccaactgttctatttatatacacttactcatctggagcagagagcatgtttataattttacccagtgcagagcttaatttagctttcttgctaagcatatgagaactttttagatgacttaatacaaaaacggctctttcttctttgggtataagcaccaaagaacctgactctcaaaaccttgcatcttaatgactgccatttatagttaatcaagagaataccatcactctggttttcaatgttttcataaacctacctgagtggcaccccctggtgactggaggtgggatgcaacatcttgattcccaacacaaatcatcagcactcatgaattgctgggggaaggatactggtcccactttactatctgcaccacagaaaagctgtgataacttaatgcaatcttatcatcccaaatggaattaggatgaagtggttaagagtgaaaattgtgtgaccagcctgcctgactgaatcccagcttcaccgtttaccaacggtgtcatctttgggcaagttatttaacctctctgtgcctcagtttcctcatcagggcaaatggaggtaataatggggcctattacctagggctgcgaggtttaaatcagttaacagctataaaatctttagaatggtgctcagtacttaggaagcagtcaatacatgttagctattgtcactagcagtgctgattagacatgaaaggatgggaagtcagaggatagagctggactatccaggtaattccaggggattaagattacaaatatgctctacagagcctgcagtcttacctactgtgcttatacaactttactaaaggcgagaaaacaaaccaagaaataaacatgggcagaataatacaaaccaaaaactatggcttataaggtatggcttactctcaggcagctcatttttttctgctctttattagaagacctatcttctgtgtactaaactgcacagtatttaagttatgacccattcaagaacaagacagtaatcacggcaatgcaaatttgcacccatttacagagcccttactatttgcttggtatcatgctaaataattaagacatattatcttaatttatcctcatgtcattactgtccacattttatctttgagaaaataggcttagaagattaggtaacttgctggggtcacgtaggtagtaaagagaaaagtcaggatttaaacacaggtacgtctgacctgtctgacctgtcttacatcatggatgatataagattatcatctgatacttatatatattccctccacccagcccagaggatgtaataagatgaattagcaccagggtcttaaataggaaattttccatgtatttaagcccaattgaacattttataatataagtagatataaagtggaagtaatggttttcttggactaaatatgaagcatgtgggtacttataagaagcacagtcataataatatactttatctctttaattgtttatgaatgttccttgttatattagcattgctatttaaatacataatgtacaacacatgtaaattttagagggcagaaattaattctagctatagccatgcttcctcacattccattttctctagaatccaatgtagttggtatccacaccgctctgatgaaactgccctcatcacagccatcaatagtctccatgttttcaaatctaatggtgaattcttagtcctcaacttctcagcagcaactgacataaattatcactccattcttgaacagcttctttactcagcagccaagacattcttctggctttcctcctttctttctcctttgcttgaacctcctcctctcattctttcaaactctaaatgttggcatgggctagttgtcactgtcctataacctttcctctccactatttaaactcactctgtagctaaaagaggctccaactgagctaccatcatgaccttcccatccacatcatcacgactcccaaatgtctacctccagccttagatcttctctgaaaaccagacccaggtttcttaatatcaacctttctctgaaagaaacaaacaaaaaaaaagatgttccttctggtatcttctcaatttcaaaaatgttggaattattcactcagttgctcaggccaaaaacccttagaataacatgtgagtccacttgtgctcacaccccataaattagagaggctgtttcatactgagaagaatgagaataaatgattattccacagaccaatgaaatctttcttgtaggacattactcatctagcaagactagatattttataccaagattataagaaattattatgtacaaatacgttctttttctaaaaccatttaggttatataatcattaacctatattttaattaggttaatgattaaatgattatctatacattgtgcaaagcattaaacataatacatactttaacaactcagtttactacatttgctgaagaaaagattaacctaaaataactccacaattactaaatatcagaattttcctatgcagaattatataaaagataatttaaaaataattcttggtattgctttcttcttacactcggttgtactgaatacaagttctcctgatgatttaggttactctagatgttattttaatataaacacactacccatgaccaaataaaaatatgagtgtgaccagtgtttaaattcagtgggcctattttattctcaggttttcctcaggccagtgattaaatgactattagaaatgccatatatttttaaaaggttctccatctgcctttatactaaaatttctctcatgaaaagccatttatgttacttttagaaaagtgggctgaacttaaatattatatacaattaatatgtgaactttttttttttttttgagatggagtcttcctctgtcacccaggctggagtgcagtggtgccatcttggctcactgaaacctctgcctccctggctcaagcaattctcctgcctcagcctcctgagtagctgggattacaggcatgcgccacctgtaatggctaatttttgtatttttagtagagatggcgtttcaccatgttggccaggatggtctccaactcctgaactcaaatgatcctcctgcctcagcctcccaaagtgctgggattacaggcgtgaaccaccatgcccagccaatatgtgaaattttttttaactgcttactataactcttattctaatgtcatagacactgaaagagagaagttaaactgtgctaaaaatattacattttgaaggaaacattaatttctgatatacaccaacagaatgaggaattctaaaaagagcatttggtgtgcaattataatgtattaattaatcctggccctatctcccaccatccccacttgctctctctggggcagtgacactagatgttctcctctctccctgctaaggtgattagctgatgctcaactgtaagatgccctccctaacctccaggtcttggtgaacttgctcttagttctcatggcacggggtacttagcatgggttaactcaagattatatttgttagtatgtttagtttatgtaacctgtctctccaactagacagcatattccaggggacaagggaacttttctctttttgcttactgtcatatctccagtacctggtactaaagtaggcactcaataaatagctgttgtattattggcctgattttcctactaaactacaacttccaggatggatgcaatgaccatgtctgtctaataaactattgcatcctcagagcttatcataacacattgttcacatataataaacatgtagcatagatgcataaacatttgctaaacaatgagtatagaaaaatataaaaatgttttatgtttagaaatctgagcaatctcagtgaatttactgaaaacctccagagcacctaaagcatcagtaattgaacattattaattcaatccaacaaacttcactcaacagttactatatgcgaggtcttgcattgtaagcaaaataggatccctgccctcaggcagcttacagtccagttgagataaacaggtagtaactattacaaaataagataggaaaattataagagatttcaaatttcataaaagttaaaacagggttagaatgaattcaaactgtgaaataccagagaaggtttccaggaggaagagacttttaggctaggacaaaaagaataggtacaattttcataggcaaaattgaacaatggtaggaaagcactccaagaagaggagctaagttactcacctaagtatgaaagtgaatacaaggtatgaagtgaataatatggcatggccagaggggagagattcttgcaagtatttgcgggagacaagcttgatgttaagatgggattaagatgcacatatcaatacataaatgtctaaggagtcgggaactgggtcacagagctgtgcagccacatcagcctttcttctattgctcagagccatatatacaacctgtctatcttttacttaaccaacatttattgtgcacctattacttactcattaattcaaatattagttgaatctctactgtgccaggcactgttctaagttcttaagtgtgttccaggctcctatgtgctatgaagtgtgtgaggggaggggatgctacaaggattcaaacacagttcctgacttgaagaagccagcactgcaaggtgagcttagacaaataattgaccatgatggtgccatgtgataaacagctgcagtggcagataaacggccatggtgcatctgaattaagctttggagtgaacctgggagtttccgtaggacaatgaaggaggtacactttaaaggatacatttctcagatgtggaaaaggaaaggggaattctggagatatgaaaaagcaccaaagggtaggaatgtgtccaatagcaaaaccacaaattggtgtagacaaccagagggaaaggtttagcgagcctggaggggcaggagattacaggtgtcgtgtgttgtggtaaatggttaactcaaacagaattaaaggacagccatcaaaggatttcaagattggaactggcacagtcggatttgtataccagaaaaatcaccttggcagcagtacagagggtggtctgaggggaatgcaaggcacaggaggccatgggaggacacctgcaataatgtcacaaagcgggattcagatggacacagcaggaatgacggtgggtcgagggaggagtgagaagaagatggacacagattaggcgtatctgcaggatctggtctaagtacatgtgaggtgggggtaagtgaggcagaagtaaggtaacaatttttggatgacatccagggttctgatgtgggtaatcaaagaagccagtatagggaataaaggaggaggatcatgtttctggattaaaaaagaatacaagtttttaactgtcagatgcacatacacatctggggttcagcagacaattctgagaagagctagagacctgagtatccttagcatataaatcataggtgagccctgagcttcatggaggcagaatttaagtgagaagaccaccagaccagggccaggaccccagagaacaggacatcttctcgattgactttaaacctctcttcccactcattcagagaataccagggatctcactggatggaaggttggagtttcatgactcatttcaggctcatatgatctcatgaccaacgtcaggacagaaaagagtgtctccaccctttcttcgatgtcagaaaggcaaaaaacaatctgcttttccttcagtgttgctttgagcagtcattaacaccagtatcaattctgttaaacaacccagaaacccaggagttaccctggtctgaactctttccatatccacaaacagggatggctatgacactatgtccattatatctgtgttccatttccacagttactcacctattttaacccattcctcttttttaagacctcccctaatcccttggctgcactatagcatagtgatatttttcagctccactgtccctttaatggctttccattgcttttgaagttgacccaaatctcaacacggcccgaatgcctatcagccagccactcacctctccaagcttcatgatgctacaacatccccttctgttttctgtttcttgctctcagctcagtgtctgtgcatatgctggtccttttattcacagccccccttaccagccccacctagtttactcctaccccttcctcagctccgcagttcaaatgtcacttctctccctccaactcaccaaactggatcatgtctccaccttacagattctcatcattccctgcattgcccttcatagcacttagaaggcttataattatatggagagtgattatttgataaaaagtaagaactatttctccctagctcaccactttatgcctagtaccaggccgtatgtccaatacaaagtaggcacacattacatactgttgtataaataaaaagagatgatgagaactcacaatagtagtcttattttacctaaagatgtgttgctgcaataatttggaaaaataagtaagtcaatatatgtgtgtgtatacatatacatatacaaactatatatatatacacacacacacacacacatctatatatatatatatatagattatacattaaaaagatacagtacaaaatgtaagagaaggtgactgaaaaatgatgtaccttaaagaaaagctttggccctacaggagatgtgggttctttggacctgcatcggcccacacctggaaccatcccaagccagaatgtcagggcagatccatccgtcacttcctcaccaccacagaaattagtggacacagtgggaaaactggtgaaatccaaatgaggtcagtagttttgttaattgttcgagcaacgataatttatcggtttgaataattatactatgaggatgtaagatattaacattagaaaaattgggtgaaaggtatatgtgaattctctataataattttgcaacttttacattctcaagttatttcaaaataaaataattttcaagtgccagggctttgctgggataataatataagcaatacagatctattagaaattattttttctgtattttattttgtgatagggtttttcattcaacagttattatcaataacaatctatacatgtttacaaatataaagtatatgtgtgtgtgtctgtgtgtgcatatatatgtaccttctctcgcattctttttttttttttttttttaagatggagtcttgctctgtagcccaggctggattacaatggcacgatctcagctcactgcaacctctgcctcctgggttcaggtgattctcctgcctgggcctcctgagtagctgggattacaggtatgtgccaccatgcctggctaatttttgtatttttagtagagacaggcttttgccatattggccaggctgggctcgaactcctgacctcaggtgatccacccacctcggcctcccaaagtgttaggattacaggcatgagccactgtgcccggcctatcactcttttttcaaagtaaaaactgattaattccacctttattttcatggttttctgcatgaactgagtacagaattactaataaatggaatgctgaagagtggtagaaagaaaagagtaaaagaaaaagagatgaaggcattttcaaaggttgataaaataatgctatggtaagttttggggaaatttagattatgtgtacagagaaatacaacctatatcatggaactgacatttatctaggttatacagatcccaaattttgctttgacctgagatatcctgataattgcttcaattttccactttccttttcatggatataaatatattatttttcagtgttcagtaaatggtacattaaggttctagttctttattacatgaactgaactactttatttagttgttagagtggattgagttggagacacttcatgaactggcagacattctgattggtagttatgctattagtcccactggtaacaccatttatttggtgagctctgttgagaaaaagtaataagtagttgaggaattacttcaaatgcctttgctatctctggctgcattaattttgagatgcctcatttaggctataaaaagaggcaaagttaaagtatataatacagacattctgtcacctcaaattggacctattacaatttagcattctctcaagaaggtgttatagctcactaagctgtaccacttttcctttgaatagaacaaaattttacgtcgtttggttcacaggcataatgaaagtggcataaactagattctaaagatgataagccatctctaaggaaaaaatgtagcttacatttcacttccaataaaatttcaaatgctagaaaactttcaatctataaattaaatgtgactattattattatttaaaataatgtgttaaaaagaaatggatttatgtaggtgtgtgtgtatttaagtctcagtttgtttttctttaagtggacaccaaataaatcaaaaggaatggtatccaagagatggattcagtactgaatcacagagcggtctgatccgtaaacagctgtagtagcagtttcctcactgccaatactgacagccaagaagcttggagaacttcaaggcaaagaagccaggacctgacctaccagcttatacagagacactttatttcaggccttggcatctgagtgtaagagctgccaaacacataaatcagtacccacaaggctaaaggtacttgtggagattggcaagaagcttatgaagtatcacatgccagcccaccaataggattggacaaatagcaatgcacccaccatacaagcactttcaaaatgcaccgggactctcacatttgaccaacatcatttatagtagtcacattcaaattcactgttctcccctctgccccacttccagccactggtgtttggtttccactgcttcatgcaggacaagccaaagagggtacagagtttaccctgcagaaacacatattggttattactatattaacaaaatagccaaattaaagcacatctggttgttattttggttatttttggtatgaatcactacatcattgttctggttgcttatgaagcactctaccattgtgattttaaaaaaatacatgaacaggaaggaactgattaaaatgcacctgccaatcaatttaggtaatactaaagaaaaactaagacatagcctctgatcttaaaaaaagacaacagtccaattggggaagtatacaatagtctcagaaaggttaaacaacaacaacataagattaagaacacccaattctgcaaacagaagaagagttggaaggcagcagacaactaaacagtaaagaaatcatggaaatatgattacttcgagaggtcagaagagagaaaaattccttccagtgaatggtgtgagatttgggctgggtgtcctaagatacagcttttgtgcaggcgtggagaggcagccaggtatatgagtgaagaaagacgtatgtgcaaaaaggaagaggagatgattggttgagtgcatgactaccttaatgggaagaaggagttcatgctaagggggtacatcccagaaggtacaatgtccttgatgatgcaatcgatgttttgagatttttctctcttgaaagtggaagatttcgcttcagatgaataacatacaagatagtgtcatataagaattcagtggcggctgggcatggtggctcacgcctgtaatcccagaagtttgggaggctgaaggaggcagatcacctgaggttgggagttcaagaccagcctgaccaacatggagaaaccctgtctctactaaaaatacaaaattagccgggcgcggtggcacatgccagtaatcccagctacacaggaggatgaggcaggagaatcgcttgaacccggtaggcagaggttgcggtgagccaagattgcgccattgcactccagcctgggcaacaagaatgaaactccatttcaaaaaaaaaagaaaaaaaaaagaattcaatggcaaacgggtgtgcaaatggactagaaatgaaaaagactaatatctaggtaatctttcccttcctcctctttccctcccttactctgtcttttttttaaagaaaacagaagcctgggcacggtggctcatgcatgtaatcccagcaccttgggaggccgaggcgggcagatcacctgagatcaggagttcgagaccagcctggccaacatggtgaaatgccatctctaccaagaatacaaaacaatcagctgggcatggtggcgcatgcctgtaatcccagctacttgggaggctgaggcaggagaatcgcttgaactcgggaggcagaggtttcagtgagctgagatcatgccactgcactccagcctgggtgacaagagggaaactctgtccaaaaaaaaaataaaaaaagaaaacaaaacaaaagccataattttgtatgttaagtcaaaggagccaatggaaaaggagctcctgaaaatgcttgagggaaaaactgagtgacatagaataggcatgacagtgttccatgacacttggcagttacacaaacacaagtgttttcctaaagcaagagcttccatgaactttgtactgtgctaagagtttcttttttgtttttcttgagtcagggtctccctctgtatgactccccggtcatagaggctggagcgcacgtggtgcaatcacggctctgcagccttgacctcttaggctcaagcgatccctctgcctcagcctcccgagtagctgggactacaagcgcctgccaccacgccccgttagttattttattttttgtagagatgaggtgaggcctccctgtgttgcctaggctagtctcgaacacctgggctcaagtggtctgcctgtctcggcctccgaaagtgctgggattacaagcgtgagccactgcgcctggcctgtgctaagagtttcactagagagcctcaccaaacaacagcctgtcacgcaggtattattctcactttgccaacgagaaacgcaagcttagagaggttatgtacctaacccaaggtcacataccatggttgaaactcaagtccaggcctgagggactaccatgccacactcttaaacaacaccttactttgtttattttaagagcaaagaagcagctcttttaaaaaatgttaagtagacataagctagaatgacagaatgtgtggcaaatattatagtttcatatttaccaaacagtggtgctgtttgcagttaaggattagtttagaagtcataaactagtctgggctatttaaatgaccatctaatttatcaatacacagcatataatatacatattagtctgcctatgtgttgtataataaaaaattaattatctggtctttgccctgcttcctgacacagagctcctaaaacctttggtattttttaagtgactggagtatctttttttattcataataaacctcctttgaccatgccttggtttatgttaatgagatgacatatggcagaaccccctagagagtttcaggtttttagctcctcaccagaaacagggttagaaatttcagccccaacctccaacttctagaaaggggagagaggcctggagagtgagcacaatcaccagtggccaatgatttgatccctcatgcctatggaatgaaacctcaataaaactccctacagggcagggtttggagagctgtcaggttggtgaatacatccatgtgctgggaggatggagtgcctggagaggacatggaaactcagggttccccctgataccttaccctatccatttcttccatctggctgcccgagttgcatcctttatcaaaaactggtaatcataagtgaaatgccttcctaagttctgcaaggcgttctcaccaattactgaactggagacaggatcatgggaatttcccaagttctagttagacagacaaaagtgtgggtagcttggggatcccatttggagctggcatctgaagtgctagcagtcttgagggacagagcccttgagctgtggcatctgtgctaactgcatagctagcattagaatttaattgaattgttggacacgttcttggcatcagggaattggagaatacatttcatgaggctatggctgccatagataaattctgatggatctgagcaaaattaattgaaaaccttctgagaaggattcaccattctagatgccattaagaacatacataattcatgagaaaagatcaaaatatcaacattaactggagtttggaagttggttccaaccctcatggatgactcaagagttcagtggaggaagtaactgtagatgtggtagaaatagcaagagaactagagttaaaagtggggcctgaagatgtgaccgaatggctacaatttcagactcccacaccacactcttaaacaatatcctactttgtttattttatgagcaaagaagcaactcttttaaaaaatgttaacttggacagatgaagtcatttcttttttcttttttaaaaatttcagcagtttttgggaaacaggtggtgtttggttgcacggaaaagttccttaatggcgatttctgagattttggtgcacctgtcacctgagcagcgtacactgtacccagtgtgtggtcttttatcccttgtcacccatcaaccttcccccgagtccccaagtctgttatatcattcttatgcctttgcatcctcatagcttagcacccaaggaatggttttttttttttttcttttttctttgagacggagtttcgctcttgttgcccaggctggagtgcaatggtgcgatcttggctcaccgcaacctccgccgcccaagttcaagcgattctcctgcctcagcctctggcatgtgccaccacgcctggctaatttttgtattttcagtagagacagggtttctccatgttggtcaggctggtctcaacctcccgacctctggtgatctgcctgcctcggcctcccaaagtgctgggattacaggcgtgagccaccgcgcccagccagaatggcttcttatggatgaattaaagaagcagtttgagatggaatgtactcctggtgaagctgctgtttacattgctgaaatgacaacaaaggatttagaagattacacaaacttagtggataaagctgtatcagaggattgactccaatttcaaaagaagttctatagtgggtaaaatgctatcaaacagcactgcatgctacagagaaatctttcatgaaaggcagtctccatggacgcagcaaccctcactgttgtcttatttcgagaaattgccacggccactccaaccttcagcaaccaccacactgatgagtcagtcttcagagggtcataatgtttttgccagtggagggtcttgcctccagcaaaaagaaatacgactcgctgaaacctcagatgatcattagcattttctgacaataatgtatttttattaaagtacacacactgtttaagatacaatgttattgcacacttcctgtagtatagtttaaacaacttttatatgcactgggaaaccaaaaatttgtgtggcttgccttgtgatattcactttattgcaacgtttacttcattgcagtggtctagaactgaacccacaatatctctgaggtacaccactatttatttttttgtaacttttctgttagagctaatctttctccatcattgttattacaaaatgtagatggatgaatggctataaaatagatttaacctatatttaaatctaccaatcttgataccctcttttaaataatcaagacaaactgaatttacaaaatatgattagagcagtttgcttaaatttgtagtccctgattgaatacagatgttatgcaaaataggctgggtctggaaattacccacaattgcatccttattatttagctttatttttgctttggcaaaaaagaaagcaagtgtcttgacagagttcctgagatagttgcagaaataagaataaacctagagccaaataaaataatttcatacatgtaatcaacaacacacaaagcacaggcctaaaaaactgcctattaccaagcagtaaaatagaaatgccacaattaaaaaaaagaaatgataaaattaatatattaatagaatcaattgatgttttcactctttcattcttgccctgggaatttaagaaacaaggcaatacaatttaatcatacaaaggattaacatttcaatgtttaaaaatagtaattaatgaatcagaacatgttcttagtttctactgttttctaagccaggtaacagacagtagtgtggtataaatgtataaatcagcatagaaacttcatggaagggctatgtagtaacatggttaagagtctagactctagaccagactgccggggttcaaatccaggttctgcacttattgattatgtggtttacagatgagaaatctaatcttctatgcctcaggtttcctatcttcataatggggatagttcaaaacaatgcctggagcacagtgtgttctatccaagtctcagcttgatgatcttgtccttacttactggagtctcatgctgcagtgctgacatgtgtccctggctgttccatgtcttgtgcctaactttctcctaaagtaagaacaatagctactagactgtttctctgggtgctggcattgacaggctaaatgctaagtgactacgatgaagacttgaaatattcttcatttgaaataaacagctaactcccaaattgtacctaactaggggagtttatcatgaagaaatgtttaaatgcttaattttyaaataagaagtaaccagagtgttgcaacatgctgttaaataacccgacaaacttcaatcactatagctgtagtagagtgcattctgcaaggatcccagagtaaccagtattttggaaatgcaatgttgaaccgaccatactaattatctgctgattaggaagtatgacccagtggttgccaagtgactttagtttctttttagttttgagtctgtgcatttcaaaatttggtgttgattgtgtatcagatgagtggctgcttcagaagtcaaaagagttctctactgtgtctggggctctaatttgtcaagctgtgtcctaattgtggcttgtgtttacaaagtgtcatcaatctgaatggggaaaaacaggacaggcagttggattgatttagcgtattctgtacgcagagcagtgttaaagagcagagaccttgaaattcccatcctcttacatatgtatcatccggctacacacaggcctgctcccctgctggaatcattccacaccacacaaaacaaatcatggatggattacattatggctttttcaggtaatgaccaatataagggttgaagggcttacataaatacaggcttaaaaaaagtataaaatcctgtcatttgcagcaacatgcatggaactgaggtcattatgttcagtgaaataagctaagcaaagaaagacaaacatcacatgttctcactcatatgtgggagttaaaaaggttgatctcatggaggtccacagtagaatgatggttaccagaggctgggaagggagtgggtagaggggaggatgaagagatgttcattaatgggtacaaacaaacataaactaaatagaataagttccagcgtttgatagagcacagtagggtgactagaataaagaataattgtatatttcagaataactgaaacaaaagatttagaatgttcctgacaccaagaaatgataaacgtttgagatgatggatatcctaaataccctgattggatcattatgccctgtatgaatgtatcaaaatatcccacgtaccctataaatatgtacaagtattatgcatgaattaaaaaatttttaaagcaattttctattttactaatgtgaattgctgtgaaatgccagtgtagtctcatgatggcctgtataacccctttctaccttgaccatgaatgaccccaagagtatgcaatttggaaatatctttgcacaatattaaattcaaattatgccttcctgttcttcctagtaccttttataaatcgtaccatctttgtgaactttaacatgactgtaatgactggcaaaccggacacagttctaacacaaacgcttccttagaatgggctatcatgttatatttccacaggtacacatatgctcctgtcaaaacacctccaatgtcacaagtccacagaacgctgctcaatgtacttaagactcccaagagcattttataaacacaaattgtgtttatttctgataagaaatgcctgacttctatcacctctgtttattaagactctttccctggccctcagctatgtacagaacagactccctttaaattaaaagaaggaaaagaagtcacaatctctgttgcttctttcagagcttaccatctgcagtgggtggcctatatcttactgtaattcttatgcatcgctttcttttcattctatcaaccattgtatcaactgtctctctcattatatcaaccctagttcaaaaaccatcaaaggggttctcaatatgtataaaattaacccttaactccttaacatgacattaaagactctcatgttctgtccctaacccactatttcacatcacttctctataaacctttctctccagacttgtatttttgtcgtcgttttctctctgtgatctggcttctacttccataactctaatactgattttaatccagtgcgaacttacttcagtaacgagccttgctgaccccccactccgcacacaacagacctgaaacctgcacttctcttggcctccatgtcactgtactatcccatctcctcctccactccagcatctctgacatacttcctcatctcctttttttttttttttttgagaaggagtctcgctctgttgcccaggctggagtgcagtggcacgatctaggctcactgcaagctccgcctcctgagttcaagccattctcctgcctcatcctcctgagtagctggaattacagacaccccccaccatgcccggctagttttttgtttttgcattttttgtagagacggggtttcaccgtgttagccaggatggtctcaatctcctgacctcgtgatccacccgccttggcctcccaaagtgctgagattacaggtgtgagccactgcgcccggcctcatctccttctttagctctttctttacctcctctaccctgtctgcacagacattcatgaaggtacatcatgctggtgtctcccaaagttacattttcatagtagggctactccagagaaattagtcttttttcctcccttggttatctttattttcgttcaataaatgatgtaattatctaatttttttttttttttaagacaggatcttgctttgtcacccaggctggagtacagtggcacaatcacagctcactgaagcctcagcctcccaggctcaagtgatcctcccgcctcagacaccaagtagctggaactacaggtggtgccaccacaccatgctaatttttgtattttttgtagagacagggtctccctatgttatccaggctggtcttgaacttctggactcaagtgatccgctcacctccgtctcccaaagtgctgggattacaggaatgggccacaaagcctcgcccattttattttctaatgaaatgtctttttacctcactgcaggtagccttctacccaaagttacatcttcagctttaatcttgcccaattttaattgtgcatttccaactccttattggctatgttcacttggatatccactattaatacaaactcaacatatctaaaaccaaacttatataccaaatctctgcccatttttttttttttagtaaagtaagtattttgcaagatagatttcagagccatgtaatcattgttgacttctctctcattctttatagtcaataacacttagagagtcatgctctgaggtatcttcactatcccttatttttgactgctattgcaatccctctaaaggaggtggttggcatctcgtgtatagcacactattatctgctggatgccatgcatccatctctgttcctgcctatccatttgacacactactaatagatgagccttctgggcagatagcggaaggcagctcagcattccttccagccccctgtcttttgacatcttaaagaaaagagcctaggaagctaaaacctacatttcccagaggcctttgcaactaagcttctgtgtgcaagctagcttccaccaagccaaagcaagacagaggtgagcagtgttagggagttgccctgtgcaaagaggctgggtcttctggcaagcatgacagctgagacgtaagtcattctggggcagctggggagagattctggcatccagctccaattagaggtgcaactggtgagcagtgagtggcagaggtgttttgctagaagcgtcctctggctgctctgctggcataatgacatttaactccctttcatcataaattgttaacgtggtggattctattatcagcaaccaagaaccctaaaaacacttctctaaactcctgctttcattatctcaaccctagttcaataaccatcaagggggttctcagtgtctgcagaattaacccttaactccttaacatgacattaaaaactctcatgttctacccctaacccactggtactatttcacatcacttctctataaaccttttcccctaggcttgtatttgttgttgttatagggcttcagcttacactatcccactcatcagaaatgcctttctctgccactgacatataaatcctgcctatctttcaaagcacagaacaaggccaggtgtggtggctcatgcctgtaattccaacactttgggaggccgaggtgggaggattgcttgagcccaggagttcaagaccagcctgggcaacatggaaaaaccccacccctactatgcaaaaaatacgaaaaaaataaaaattacaaatacaaaaaaaaaaaaaaaaaattagctgggcatggtggcgtgcacctgtagtcccagtgacttgggaggctgaggtgcgaggaatgcttgagcccaggaggtcaaggctgcagtgagctctgatcacaccgctgcactctagcttgggcgacggagtgaggccctgtctcaaaacaaacacaaacaaaaaaacaaaacaaagcaagaacaagccccatctctgccatgaagccctcctggaccacctcaggcagaagtgatttttctctctcacctcctctaaacagactggatacatggtattgttagagtacatgtttttcacttatagctttgttttcttgatcatttcttctttatatgatggtaagttttctctctctacttttcattcttgaagaacctaaattgtaacatctgtaacaactatatatagttaatttatggagcacctgcttttttgccagggactgttccagatactctgcaagtctctccctgaaacaaccatgtgacaacattaaaaacaacccatcttatgaatgatggaacaagttctaagatgttatatagcttgtcccaggtcatgtagttagtcagagaggcaaatttgtactcaaacctagccaagctgtattctctccagggtaaaatatagtccctttcacaaaacaggtcctcaatagatactttatccaattattgattaaataatcagtaaattaatttttcaaatgacaatttcttgagttcttgctctgtgccatgttctctgctaagcacattacaaacatttcatttaatctttacatgatgtagataggtacgttgcttgtggaaaccaagcaaataaactgcaatttagagaaactaagtaacttgaaagatcacaaagctggtacatggaagtttggggattggaactcaagcatttggctccacagtatatgtagtgggcagtggagcatccacttctgttctcgaagatacaatgatttgacttggagactatttaacaaaatgattcatagaaaatattttatttttaaacaaaaaaaagtacgtagtacatttttttgtattacaagagccatcatgactactgtgacaactttaaaatttctagtttgcaggaggtagaaataaccaaatctaaaaggaagtcagggaaaagagagggacaggaagggtaagaggaaccttggggacaataattgtaatagactgtatttaataaaagtattttaggtaataaaaacacactttatttaataaaaataactactgatgaaacctctcagggttctcttataatataaagtctcattgctcaataagacacttttctttgatgacttctttccctatttgacttacttttcatatgcaaaattgtagtttgttcattatgtattgggttttgttatatattttccctggtaaaattatcattatggaaaatttggcaaatgcagacaattatatttctttttggaattcacataagtttattttaaatccgtttcaaagcaactgatctggaagttacagtagggaatctgaggagtttgctctagctcaagccaaatgcatcattcctttataaggatctttttgttcctttcttgataatatttttgtcattcagaaaatcaatgaagatacaaaatgatggcctatagaaaacaataaatatacctacctctcaaatgcatgtaggcagctatagtttaagaccaaacattcagttcaacaatacagggtggttcatggtgactgccaagggctgttctgtaaaggatgggtcagccctgggcctgtggaacacctttgtgctcgtatatcaagcacacatcatgttccctttatctataaatgcctgctaattttttttttttatttttaaagatttttgttccctccattaaactgcttttatctcagttttcatttttgtttcagaacatttcaattttatacattaaatttcaaattaagtaagtagctagacaaacgggactcctctgcaattaattttcttataaagtatgaaacttgcacctacccattctgctaattatgatacaaataaaaatcatactctagtgaaaagtgaggagttttaatgcctttctggtccacagtatggtaagtctcagcaaattctgctgaattcattctaaagaaaatttcacactttgtgtacatttcaaaatagtttgttgctatttctgaaagctattcagactgcattttctgcaagttgtaacagtttgagtcattaataaaactactgagaatgacttttttttcattttcctttgatgagttaagggcacaaatgatcttgataacatagaacagtttcataaatcatattgcataaatggaaggttggcagacctttgtttttccacaaatactttcgattgttggtcctgaagtgagggtatgactgctggaccatggtgatactctacatctctgaagtactttagagtcacaaaataccttctccatgttatctggacttcacaaaagtcctgcagcaggaacagaggcattaattgctacatcttctttctgtaaatgagcaccctaaggatttttgggacttgttgggtgtcacagtagcgctagtcagagagaaataagcaccaattctacacatacttcttttttcaccaccctgagagacctgggagccagaaaacgttctggacatcatctagtctgttcccacctaagccctaacctgacccagggtaagaccacgcaaaatttactccagctcacagagtgagattcttgccacgcagggactaatatcttctgtgttcttcccaagtgtaatggaaataaaagtttcccagttagggctaggtttggactctagtcccaaatacactatctctaatctttttttttttttttttctttgagacagagtctcgctctgtcgcccaggctggagtgcggtggtgccatctccgctcactgcaagctccgcctcccgggttcacgccattctcctgcctcagcctcccgagtagctgggactacaggcgtccgccactacgcccggtttattttttgtatttttagtagagacggggtttcaccgtgttagccaggatggtctcgatctcctgaccttgtgatccgcccacctcggcctcccaaagtgctgggattacaggtgtgagccaccgtgcctggcctctaattttgtacaattctaggttcctcatctctgaggtggaactattaatacctactttgtgcagttgtagggatgaaaaacaggtaaggaatgtggtgtgcctggtgcataatcaccactgagtacacaatattttattcccttttccaattcgctgttcacataacagtacttagctttcaaatttcaggccataaatgaaaaacaattcagcaattcatagtagcttccaaaaacaggttgcaaatgtctatgtctgacttttatagctaatccttaacttacaaatgatgtttgaatggtcaaacttttcattttttatttttattaaaatattaaaccaaatagtaaaacttattattcttataataatttaagattttaaaatataagtccaaatctacatcagtctgctttggccaatatatttgttataattttatttttgtgcttcctttaaaaaaattgtactgtttggtgattagaatgcaagtgatccttctattatcaagtattttgtgaagtgactcctggtaacatgattttacagcaatgaaaacccaatactttccagggtgatattcaaaataaagttatgcatataattttatgttgcattctatctgctgcatgcagtgttgcgcatggtcctgggggctgacactgcatagaaagcattttcttagaaagccacagtgcatcatttagtaccaatttcgctaagaaaccaaagaactctccagctaatactaatgtttccctccttacagtctaatgggcaaggaaggagcagatacccttagctccatgttgcagatgtaggtactgagcctggttgacttgcacacagggccagcccagcagaaaggtgggattcaagttcaggagtaagggctctcagcctgggctttcactaaaccatgctctctcttccatgaaagtctcccctgttccttcagacaataaaaataacacattgccttggatgaaaatttttctagtctgatcttgacatttttgagaaaaagggggagttgtctcttgaaagacatgttctgcatttcgaattcaccagaaataaattttaaaagaattcatttttattatttcccagatcctaaacagctctcttcacttcgtgtttaagctatgtgaaaattaaatggatacaaacaaaatatgatagaaattaaagtatatgtaattcataatttgtataggcagagtaaaaatctttactagagtttactaatacaagtgtatattcatgtgcctattcatatgtagtgaaagctacaatttattgctacattattatctaatgatgtatttgaaattagagcatttttataaaaataagtgattctgcagcagaatttcaatgcaatttgtcacatttcctctttaaactgtcattctttttttttcctgccacatgagctgtttgtcatttgaaataagctgtcaggttaaaaaatatatattgtcttctttagggggacattttgtggctgttctcctagggtaaaaccttagaaatgtgacttttaggcatgtgtgaatggcagtaggatccagtctctatttattatacagaaccttatgctctgcatatctaggtagtaacatttccttagctttatccaactgtacttgcattattttttcctgtagtatgatttgtttgatttgtttgcttggttgttactttttcaattacattacagcaaataccatttatataaattacccccaaatttcttctgaaatggaaaaggaataaggaaagaaatacaatattcagtcctattgtcagatcaaatgtcatggctattggtctggaattatgagccttgtggaccagagaatacaatcatcaaaacaggaatctagttcatcggcatcatgctgtagtactctcaaaaatgattcctcgcaacatgctatttggttggcagaatgtactaaacatggcaaaaccactgacctaaatcagctattttcaactgcttttacctccatgtttatagacatgtagttcctatgtttatatacatagtcatatagacacaggccaagagacacaaacccagattaatgaaggtcactcaccatggctatggcacagacagtaggttgacatcttcagtaaattaactgcaactctactctcctctcatccaacccaacataccagtgagtcctaacccaccaatgtatactcacgtcttagaggaaagctgctagttctagagggagattttttacaatgaaattgtgcacagaatctcaaagtataaaaaggtcaatattgatctctagttataataaatgtattttataaattaaaatcttttttatgaagccaacataaaaaaagtttgataaatcctaaaatcttattttttgtggtatcgatggcagcatccaatttatcttgcattttgtttcaattagagagtgtaaaagaatcaagatttactgaaattcacagttaaaaagtaagagtctttagcaggccattttgcagtctcagaatcctcttcactagaataatctagattatcacagggtggaaaagtactaaaataatataaattattactagttagaagggaataagggaagcttctgactgctcaaaacagtctatatcatgatctgtatgaaggtcgcatgggtgtatacaaatgtaaaaattcactgagctgtacacttaagatctgtaaactgaacaatgtacgtgtcatgccttaataataacacaattacctagaagcatgaaaaaagtaataaaagtttttgcttcaaagttaataaaaatttctaatgaaagtttatattttttatcattataaacactaaaaattagaaccaaaatgatttgctctacattactgcggctgtacatgcaaaacattcacttattatacaagtgattgccaggctgtggagagggcacatgctgaacacgtgtctcactctgcctgacgtttaattgagtctggcacatgtgtgctctagtaacgtactcaactgtgcaattttatgtgagtggacatctgcagacatgaatttgaaaacaactagtacaaagtgacaacctttctacccaatggtatataataaaaagagcgataacaggaagctgcagcaactaccatctcttgaggttttattacattacaggcattgtgctaagttcttgcattcaccatctcaaggatctcatttataggaattttaaacacatcagcagagatggtcagatgtgtgtgcggtctgcccccaaataagataatctgatagaacaaattgacacagttataggctccaagtttgtaaaaatattagtaggaaactcttttatatgtgattttgatataactgcaatttttaaaaaattaaaattcattaaaatgatccccaaacacttctataagacctagacatctataggtaccattttaaaaagcacattgaggctaattttctgacaccaactctaattctcattctgagagtttatagttgacaaagtcctttgttaggccacaataagagttaataagcttggagctatgaatgcatttcctggattaagactcctttccagtacaactattgtcttcatgactagtatttctcacatgtaaatttcttgatactttttattgtgcctcttataaatcctattatattaaatcttctttaatagtttgattactgaaactctaaattccaaactcttatttaaattgaaataactgattattaaagaaccaacagatacatgtgaatctaactgtgctaaatcacaacatccatactctcctacttaaggtgaatctgtcatttcagacacagtcacggtgcgtcatgatagtgaaaacacaaaccacatgaccaaatgacaaaggacaactggtggtcccaagaagttatatttacacaggagggctcaggtttttcaagtatgttgataaatcgctaactcattccatcacagattgaataggacctaagacataatttagtccaaactccttgttttctggttgcaggaaaaaaaaatccacaaaggtgaggcaacacttccaggtccactacttggcagtgagggggttatcagctcctcaagccacctttgaaaatctgcttcttcaacacatactgggatagcctttttaaaaaggtgacaggccgggtgtgatggctcatgcctgtaatcccggcactttgggaggccgaggcaggcggatcatctgaggtcgggagttcgagaccagcctggccaacatggcgaaaccctgtctctattaaaaatacaaaaattagccaggcgtgatggtatgcgcttgtagtcttagctactcaggaggctgaggtatgagaatcgcttgaacccaggaggcagaggttgcagtgagcaagattgcgccactgcactccagcctgggcgacagagcaagaccctgtctcaaaagatacaaataaaataataaggttacgaatacataattatacatacctgtgggtatagtttagtacagaaaacatttaacttttctatgtggaatcctgactttatatatattacagttgaaacacagttcaaccctgcctgttatctgacaatattcaatatatttaaaggatgactttgaaagtagccttaagttccccttctcctgatgaagtaatttcaaaaacttaacccttcccagctgtcagtgtgtcattctgatcttttcaccatcttcaattaccctatattctttctttaaagaatattttccagagtgcaaagatcatgaagggatgtttaaattaacctgtccctatgcaaggttcaacttctttgtaaatagcccacaaaataaagaagccattacattaacaaatggatcagattgcttatgttctctgtgctctgcaccacatgggatatctgaccctagtcttaaaatgaaacaaggagtacagacgcgtctttgtgctcctgtctcctagatagagccaggttattactgttccactctatctctttatgactggtttcaaaatcaacaaagtctggattttacaagcatgagatttgctaaaaagaaagttttcatgattttttctgcacagaattgggacgacatatgagacaatcttgaatcttatttttccccatgataaagatggctctgcctgatccacgcagaccttccacactgactgctgatttttggcatgtattgaatgctcaataaatgtaagcttctcccatgaaagagagcagaaattactgtaatgcacaaaaaaatttaaattcactggaaattctctttgaatacaaacaccctaggtataatggacaccaaaggaaatgcctcttgtcatgttaaggatgatattctctacctgtctcctccacaaacctagcttggtatcttacatatggcaaatgttcaatacacactgaataaatgaaatatgagaatgaagtatgagaatttccttctggtgtcagtgatgccattttatagaacaatgcaaacgcattcactggaagttacatggtaggaatctggataaatcagtaatgtttatctgcaattttgattttatgatcctagttttatgcaatataaacaattaactaaataatacctgggcactttacaagtacagaaatctgaaaagcacttaagaaactcttgtttttccaaatgataagagacggaaggttagagagctataaaatatggagacaggactgttacaaaagaaaagctccttgttttctactcgggacaaaccaagactcaacataaactttgggtttacaatttacaagtatttattcataaatatttttagaatctaacagatcagatgaaggaaggagaacttttaaagttcatatggataagaagataaagatgatgtacctagaataaatagtaaacagagaggaggagataaaaataactctggcatatactgggcttttaataagtatattttgaatgggtcaaacttcataaattgatgcctacatcaatctatccagataattatcagataagcaagcttattttacagacatacacaaaaacatgttgtaattagggagtcttctcaaacgcaattattggaggaactgtctaaaattttctcttcattccaatcgatctctagtgtacagaaatgaccttcactcctctgactgtcattcttatttttctcatctcccttacacatttctacatttgcctccccatgaatcttaggttcctactccgttagcactgacaattccttcctattaacctgctatatatcctggcttgtttgtccttttcataactaaactagatctgtactatctctagttcactttttttccctcaactaactaaacaggcttctcacattttattcttctggaacctcagaaagatggaacccattttcgtggtgcttctctaagctttctccctctctccctgtctgtctctttctccctgcccctgtgctgtgtgtgtgtgtgtgtgtgtgtgtgtgtgtgtgtgtgtgttattaaatcttcttccttcatctgtctccttactgcaggccttcctcccaaactgggtccttgatatctgttcctgtgaattgaacaaatcttatagaaaactctttggtagtttattctaaagataaacacgcatctacctttgagctagcaatccccttcttcagtatttacctaagagaaataaaaacatatgtccacagaaaagttgcacacacagaccttcatctagccttataatagtctcaaactaaaaacaatccaaatgtccatcaagaagtgaataggtaaattatgttatacccacacaatggaatactatttagcaatgcaacaacatgcaagaatctcaaaaacattatgcaatgaaagaaggctgaaaaaaaagaacacgattccatacatgaagatctagaactaactggtggtaaaaggcatcagaaagtggctgtctaggggtttggaggaagcagtgcatttattggacagggacacaaggcctttctgggtgatggaaatgttcagatcttacatgagagtatacaattgttaaattctttgaactgcacctttaaaataagtgttttattgtatgtaaaaaatacctcaaaaaataaaaataaaataacctcagggatcgtccttctgccactgacttcctgtctatatttcccatccttcctgatcagttccagttctagatctccaaataccaacagaagagctccacttggatgtttcattattgtatcaaactccttcactcacctctcttagctacattattcagttcaaaggcatagccattccttctttcttcatcttattctttagagtttagttatcaccaaaactatcaattcttcctttaaatacaaatcataaatcttttcccttcaagacagaatgcagtaaagagcaatcttaacatgtaggggaggccgggtgcagtggctcacgcctataatcccagcattttgggaggctgagacaggagaatcacttgaggccacgatttcgagaccagcctggacaacacagcaaaaccccatttctacaaaaatttaaaaaattgcctgggcatggtgacatgcacctgtaattctagctactagtgaggctcaggcaggatgatcccttgagcccaggagtttgaggctttaatgagctatgatcatgccactgcactccagcctgggcaagagagcaagatcctgtctcaaaaaaaaaaaaaaaaaaaaaaaagcattacattttttaatcctaaacttagagttattgttatcgttacttgctcaaaacccgccactagaggcctggtccaggcccagagtcaatcacatctgaactacttcaataacttccgacacattcttcttcctgattgttttttggcgtttaaccaatttattactcattttcatgactaataatttaccatataatccctttaaaccattatattgatttctaatatgcagcaagatgtatgaaaccccaaatttgtttcaaagcagaagccaaccagaaagcgtgggtaaaaatgtggggctaaaacaaccaatgctacatctcttaccaaagaaattatttttgagctgacagaaacgagcaatggggaaaagacaccctattcaatgaatggtgctgggaaaactggccagccatatgtagaagagtgaagcttgaccccttccttacaccatatacaaaaattaactgaagatggattaaagacttaaatgtaaagccccaaactataaaaaccttgaaagacaacctaggcaataccaacctggacataggaataagcaaagatttaatgacaaagacaccaaaagcaattgcaacaaaagcaaaaattgacaagtgggatttaattaaacctaagagcttctgcacagcaaaagaccatcgatggagtaaaaaaacaacctacagaatgggagaaaatatttgcaaactatacatctgacgaaagtctaatatccaacatctataaggaacttaaatttacaagagaaaaccaaacaatcccattaaaatgtgggcaaaggacatgaacagacacttctcaaaagaatagataatgtcaccagcaaacatattgaaaaaaagttcaatatcactgatcattagagaaatggaaatcaaaaccacaatgaggagcatctcccaccagtcagaatggcaatcattaaaaagtcaaaaaacagatgctggtgagtttgcagagaaaaggaacgttttttgcactgttggtaggagtgtaaaatggctcaaccattgtggaaagcagtgtggccattcctcaaagagttaaaagcagaactaccattggatccagtaatcccattactgggtgtataccgaaaggaatataaatcattctaccataaagacacctgcatgtgaatgttcactgtagcactattcacaatagcaaagacatggactcaacctaaatgtccatcagtgacagactggataaagaaaacgtggcacatataccccatggaatactatgcagccataaaaagagcaagatcccgtcttttgcagcacatggatggagttggaggtcattattcccagcaaactaatatggaaacagaataccaaataatgcatcttctcacttacatgtgggagcaaaatgaagagaacttacgaacacaaagaaggaagcagacactggggtctacctgaaggtgatgaaagggaggagggagaagagcaaaaaagataactattgggtactgggcttaattcctgggtgatgaaataatctgcacaacgaaccaccatggcatgagtttacctatgtaacaaaccttcacatgtaccctggaacctaaaataaaaagaaatgaaaaaatatatatatatttttaaaaatcagactaatttttgtatgtaaaaggattacatataatattttaattcaataactgtgggctttcacaaacaatttccaattttactggctactctctcattataaaatcttcactggtttgctgacttaacttggataataagtctcataaaacatttagtgaaaaattaatattttcaccctacaatgtaatgtacccaataaaagatgacagaaggatattttaaccttttgattaaagaagtcatttgtttttcccaatcaattttctgatttgcattttcctattatatattagaaaaagtgtctcttactgtgcaatttaaaattagttttatatttgcctcagaaaatgggtacttcaactacaagatcaatttcatcttctgtgtcacttgtaatagtgcttacatatacaaaacacaatagagaatggatgcagaattgaagaccgcaacactttctgctgaaaggtcatgaaattttagctcaaagattttatttccaattatttagataatagtttcaattttatattttatttgtgttttgtcactatcgtagcccatagctatgtaattccagaaatcagggggaaagacacaatagctgattatattttttgtcattttctacaaaatgagaggttaatcaatgttaatttgagtttatagactgaatataactatgtttcacagattttgtttattctcctagaataagccttttgtcaagctctgtatttcagaaacactactctattatacttggcaaaacaaaacggcattcctgagagtgaaaccctagtaataaggatttacattatgaaattaagacaaaacaaatgtagctgttacggattttaaaagttaggtcactacatgagtctagtgggaagaagttatgagaaccaccagaatcatctagaaatttttataagagaacatgactaaaattagctaaaacttacgaattagattagaaaaacagatacatccattcatttgaattgcttctataagcaacagtgtttcttttctaaaatattaatacagtaatcatcactctcctaaagctctccttctgctaggaggaaaatatttcctcaccctactgatgttgggcttagtcatgtgatttcattcacattaattaagatgcagaattttatctagaaatattacatgacttagtctaacattaaaaattaggttgacaaaataatcattttacctaagaatatctagttacttttaaattagagttaaagcattaaaataatgcatccagttttctgtattacatttgtttttccataagtacagataaaataatattaatgatatatcagatagttttaaaactaaacactggcaggattctattttattatataagtaaaagtttagaattcctttctccacaccagtaattttgcagaaaactaatcaggaatattctgaaaatatgttggcactcttatttctattaactgcatatggtttgggattcaacttttagaataagccacgatgcatgatgcattagattttaaccagctgacgacccttggctatgtgattgtaaaggagatggcaaaatatcattgaagatggccatgtaaaacatcaatgagataagattcactcttacccaagatttttctatctatatcagatttttctatacagcagcaggctattcctgagaatgtgtccttcacttttttactttcatttgatgcgggtaagtaaatgtattcaatgagtttcaagtgtgtgaagaaagtgatataaagtaagggaaaattatggcacaatggctgtaactcctggaaagtaatgaaaagacagaatgtctcgagcatttgactggaaatagaagagactgcatcctggtgaactgagttaatttcaaatatattactctatggttttctatcatgtgtactctcactggctatattaataaatgaaatagtgatgaatggttctgggaacttgtagtgaaacttattaatatttcaacattatcaccgagtatctatgtcaacacacatcaaaaatgcatgagaaatgactacctacactcactagttacacccattagaaaaatatctatgagaagtataaatgacacacataaatttgcaatgtgattataggtagaacatacagcaagaaaaaagctacaggaagatatcacgtggtgaagtatgtgaaacaaatgaaagcaaattaattcttgcaatcggtttggaatacactgtatgaccacattaaataccattagatttgaaattatgagttcttagaaattactaacactaaaaaaatttcaacataatttaaaagtaggaaaaataaatagccactatcaaactgtaagtggctcatcagttctatccatggtgtaattttggaatcccctacttaaaaaacaaaagtaaaaacaaaacctttagttttcaaaagtttgttctactttttaaattgatgaccaagaggtaataaattcacattagaatgaggcatggccgtttaaacaataaatcaacacttaacccaatagtttccaagttgttaggtaggcttaaaaaaaaaagtctgtttatacctatatcagaagacattcgatttagttggggggtgtctgtcaaattgattgtttagcattatgcgtagagtataaaatgtcaaccatagaaatggagacagaaatcactttcaaaatagcaacatctgtgtagtagctttcatacacatcttttaatgatcaagaagattcatgcacaaaaaattatcaggataaattgtcacttggaactaaagttgcatcaatttttagggaaaaaagtacttaatggctgctagaagatattagtcatatattaaaactttccagtgtaatagttatttttgactcatcaggagatatttatttaatacattactgaagagaaaaataagatgttcttcaaaaaatcaccttttagttttaatttttattatcttatttttataatttcaatctttatttcagatttaggggcaacaatgtgcagatttgttacctgggtatactgtgtgatgctgaggtttggggtacaattgatcccatcgtcacccaagtactaagcatagtacccaagagttaattttccaacccttgccctccctccccctctagtagttcccagtgtctactgttgccatctttatgtccatgagtacccactatgtagcacccacttataagtgagaacatgtggtatttggttttctgttcctgggttaattggcttaggataatggcctccagctgcatccacgttgctgcagcagacacaatttcattcttttttatggctccataatattccatgggatatacaggtatgtaccaggataaaactcactttgaaagaataaactgattcaaacacaaattggtatgataaccaatagtaacatgtacactaatatggacattttatcatttttggtaaacaattaaacagaacaaatacctatatatgtatataactagatttcaagaacctatgcctaaaagaagtacaaagcagacaaaggttttgaaagaaaaatttgctctgcatggttttttgtttgtttgtttttggttagacaagtatttacagattcccttagaaaaacagaatttttataacagcaagagaaagcatgagtagataaagagattcagttctgacttctccctagggatttgatgctagactattcagttggcctctatgaagttcagtttcttctgtaagttttaaggaattataatgaatcttcttcagttggtcagtgaaattgttcatttactctttgcgagaagcccctgcctcagggcctctgcacttgttattccttctgcctggaatgctcttcctttagctgtccatgtggtttgacctcctaccctttcaagtctcctaaaatgtaatcttaccagagttcttccccaaacacctcacatgaaatagtaaaccctgcctaccaccttccacactgcccagtccccacatccttcttgcttcaccaccacagcacttaccttctccagggacagaagaatcatatgcttattatagaatcatatgcttattgtctctctcctcccaccccctccactagaatattaagcaccacgagatcagtgatttttgtctattttatccaatgcttttctagtgtttaaaaccagtgtctgatggatacagtgctagctctggagacacaaagaaggctaggacatgttatctgtcctctgagcagcacaacatactgcagagtcacacacacacacacacacacacacacacacacacacacacacactttgtaccataaattcctgtgcccaattgtggaggttgtggacacctaagtaacactagtcatatccatgatgatgtaaatggcacactttggggtgtacagtcctcaatctgtataaccatacccagtttccttaagacgaatatctgtaggacatgaagttgatcataccatttccacttaaaacccactggtgggttgggttcatattgtctaaagaataaactcatccttcctgatccaatcctgacctacctctccaagcagctgcatctcccatctcacctcctcactcacttgtgcaccagtcattatgaccttatacactcttccacatgccaatgctcttacctgttccactcggagttacatgtcatcctctctgttctcatggtagcacttaatgtttttatcccattagactttagttcatcccataaagtttgactctgagctcctcagggtcagaactatgagtcattcattctgtatctccagcatgtaacaaggagttgaataaatgaattaatcactctttgaaagaatatatgacttaatgttggcaattcatgaaacaattcaagtattaaataatcagccaaacttcattatacttttttttttaattgaagagggaccatcactgtcccaccacagcagataaaaaggaatatgtatgggcatatggtctccatctggctcctaaatacccacagactgagttactaagggatcactatttttaattttttgaagcttagaaggctggtgggctgataatggcaaagcatatactttaggttttatctacagtcattcacagtcaatcaaagctttttctgacctccttcaaaaaagagcaatctaacagcatttatctcccctggcaagaatgaatggctccctgatttgcccatcagcagcaccacaacaggcatgatatttagtcactaacagagagctgacttccacctaaatatctgagtcaaagaatatttctttggtagtctctgaagtgaggatttaaaggtgtcccaaacctactagtcttgttaaataaaaacgaagcatcttttaatgtgccaggattatgggaagcatctaagagcaaaattgaaataatttaacactgaaattagaaaccaaatacatgagctttcttgggctttttctcagaacacaatcaatgcagctgacttaattcttgtcagcagagaagagacatggcccaaacattctcaagtttttccatcaaagggtgcaaaataagttgactcagtgcccttttaactctcagacaactttttcccaagattttctttgaatattagtaatagtaaagtttatccaaaaacactctactattttacatcttatttatttacatttcaatgtaatgttgagattaacagctgaattttttttatgtatcagagaatgtatttaatataattatttctccctaaaccaaattatattaaaataacaatggatttgaagattagaagttttaaaattaatgctggatgtggtggctcatgcctacaatcccaacattttgggacaccgaggcaggggggtcacttgagcccaggagttcaacatcagcctgagcaatatggcaaaattctgtctactaaatatacaaaaattagctggcctcacggcacacacttgtagtctcagctacttgaagtctaaggtgggagaaatgcttgagcccaagaggttgcagtgatctgagatcatgccactgcactctaacctgggcaacagaggcactgtcagaaggaagggagggagggagggagggagggagggagggagggagggaggaaggaaggaaggaaggaaggaaggaaggaaggaaggaaggaaggaaggaaggaaggaaggggaaaagattgcaattgtttcacacaagttttatgcgtattggagtccaaagctaaaaaattctgctaatttaatatagctgaggcataaagttttttttcttctttttgagatggagtcttgctctgtcgctcaggctggagtgcaggggcacgatcttggctcactgcaacctccacctcctgggttcaagtgattcttgtgccttggcctcccaggcagccgggattacaggtgcccaccaccaagcccaactaattttcatatttttgtagagatgaggtttcaccagaggaaggctggtcttcaactactgatctcaagtgatacactgcctcggcctctcaaaatgttgggattacaggtgtcacccactgtgccctgccagttttttttttctttctttttttttttttgagataaagtctcactcttgttgcccaggctggagtgcatgatgttggctcactgaaacctccgcctcccgggtccaagcaattctgcctcagccccctgagttgctgggattacaggcacctgccaccacgctcggctaatttttctatatttagtagagatgggatttcaccacgttggccaggctggtttcaaactcctgacctcagatccacccgcctcggcctcccaaagtgctgggaatacaggcgtgagccaccgtgcccaacttttcttctttttttgaggagaggtcccactatgttgcataggctggtcttgaactcctgggctcaattgattctcctgtctcagcctcgagtagctggaaatacaggtgtgcaccacagcacccagctgctttagagattttaaagccacaacatgaaaacagaggaagggagcttccccttcataaaggaatgtaggtttgcagtcagacaaccttgggattgaatatgaacttgcaaaaaaacaaacaaaaaaaaaaaaaaagaaagaaaagaaaacttctgagacctctggggagagaataaacctctccaggcctccgcttctttatctgtaggatacagacagtatcatggggcaaattaaatgaaaattacatgagttttcatagaatctgccaaaaagttgcctcttagtaacagttcttgttttccctttattactcatctcttctactattctctagtgtgatttaaaagaccttaacaccatcatacatgaggagattaacaaaaacaggaggggtgcaaggagtttaaaacaagaaaaataaataacaaaaaaaaacccttagattctaactttctttgactgttaaatacagttttctaaattaagaattatggccgggcacggtggctcacacctgtaaatcccaacgctttggaaggccgaggtgggtggatcacctgaggccaggagttcgagactagcctggccaacatggtaaaaccccgtctctactaaaaatacaaaaattagctgggcgtggtggcttatgcttgttaatcccagctacttaggatgctgaggcaggagaatcgcttgaacccaggaggtggaggttgcagtgagccgagatcgtgccattgcactacagcctgggtgacaagagtgaaattccatctaaaaaaaaaaaaaatcataacattcaaaatagcaataagagaagtctgaggaagcaatagggtatctaacttgctaccatatctgctcttttaaagagcatttatgtaaaaaagtaccaaagataagactatacatttccagaaattcactagttgtttttctttaagacgatgagcacttcatataagccatataataataaaaacaggcagagaacgacagtgaagtgctttaattagcttaaatgtaattgacaatgaaccatttaaaaagaatatccttttcataggtgcagttatcagggatgctaacatccctgattactaacactatcaactgagcattataatcaaaatcagagagagtagactactactaagctatggagtaagttaaacagtaacatgtaattcattagttctgaaaggactaattctggaaaacaagcatatctccttagcatcttgtatcttttcctccacctttcaccccactcttcctctcttcagttttactgaattatatccacatcctttagcttgttcctagtaaaacagaaattcctccagggagtgctccctttcagatgttattaggtcgagtttggtggaacttgattcttctacttgcattaataaatgagcattatgaatgtttggaatgagaaagaaggaaagggggtgcaaaaattagaggctttagataacaaagctaaacttcacctattgaaaagacatcattattttgtctaggattagagttaattataatcatttgctcttatcatgtgcctttacctctctttctccaaacacttatttcataactatgtttgtcaagttgttaagggtaatgaccctgttttatcatcaagggggtgggggatcaagaccaaaacaaaacagatgttctaaaaactgcaggaaattgtctttgtcagaatcactgaatacgtgatttttgacttggacagtatctattacaattgaaatagaaaaaacgcagagcccgactgtgggtctcttggtggctgcttcttccaatttatctaaatttactgatcctgagtggataaatgagagtcaagttaattaatgaaaatggttgaaacgatcagttcaagcacacagtttagtagactcattacataaatctatgtaaacagaggtcgattcagattgctgttgtagccactaagcagcggtctttttaatttgaatgcaggcatatttgaatatttgcagtggtgggtggggtgggtagatgtatcttggttaacaatttctgcatatgaaatcaaaaggaacattttttaaagttcattttaaaaaccagcaaaatacatagcaccagacatttaggacaaataatttactagctcaggaatgttcacgctatataaatatactaatgtcaacaaagtaaggcaccaaattaaaaatccaaacttgaacagttattgcatgaggcaagactatgagcaagaatggggaaggagacaagaagagcttcagttagagatatttacctgtggtttagcatcttgtcagaggcctacagcagaaaggctggcccagggcaaggcaatttcaccctctctggtgtcagtcttccttcatatccctttcctttctcattttcccccttcccttccctgacactctactggtggccaaggaaataagaggcaaatgtctgaatcctttttagaccatggctcctttgatctttaattgtaaagacaaatgtgaattagttgaccagggtttctaaaatgtgttgcctgtaatatatagaaaacttctgattttatcacctccctacctgcagccatccttctcaacctaactctcttagaaaagttcttcaagtacaggaaacagagagatccacagaggtcctttgaaatgttttcatttttttacatgctaatctgacattttatccttttgttatttaatacattaagtttattgatcatattacaatgaaatgtttggggttttttttgttgttgacagcctttaagtttacagaagtcatcaagatacggaaagacaaacagaaaaagaagaaagagaaattaatggtgaaatagtcatatccattaattaataaaggataaactaacagaaaagcagaaagagaagttcgcaattgtgcacactgaaagttaactttgactaaacctatgtacagaatttttaaaatttttatatttaataaaattttaagatttattgacttctctcaccacttctgtcatttgatctatgtatagaattttaaaaattctataacaattatatacttatttcagaataaaattttaatatattactattagttttcaaagatctatatatctacatttaagaggtctctgcagaacattctttttgtttcattgcacacttcccagtgtttacacatgcacattcagtcttgaatgatgactcattaactattgatgggtcctggcattctagggcttcccagttgttagctcagtgtattcttaactaaatcgtttaatgaaaacactgacatgtaatgaatctggcatctcccatgatacacatgcaacttttgtaataataataaagacaggcatttgcactattacataaaatcctgtgacttgaaaaggtgtaggctgggcgcggtggctcacacctgtactctcagcactttgggaggccaaggcaggcggatcacttaaggtgaggagttcgagaccaactggccaacatggtgaaactctgtctctacaaaaaatacaaaaattagctgggcatggtggcaggcacctttaatcctagctactagggaggctgaggcaggagaatcacttgaacctgggaagcagaggttgtagtgatctgagatggtgccactgcactccagcatgggtgacagagcgagacgccatctcaaaaaaaaaagcaaatcagaaaggttatgttgaaaattaagctccagttcctgaggtttctattaaacagttacacattaaaatatactaatacataatatgcacgtattaaaagcacaaaaatagttatgtttaagaagtcaatataattatttgctatacaagccccaaatggagtaagcatactttttttattttactttattttattttatttatttgtttatttaggccaggatgctcttgatctcctgaccttttgatccacccacctcagcctcccaaagtgctgggattacaggtgtgagccaccacgcccggctgtaagcatactttagattttagtcactacagttccaaactttaaagtttaatttaaaagaaatgcatatatttataaagacacacacacacacacacaaattaaatacacattagaatgatgcaggaaaacaatgtgattaaaatgtctatggaatgtattcatctcagaattgaaacttatcatcatttagtctaaatatacagatgagaacacagactcctcaattttaggatttagctcacacaaaatcagaatcactgtgctgaccgtggtgagtcagggattaggaagatctcagcaatctcttggattcagtgtctatgctggctcaagttaacatttgctttggagaaactaagttagagatacacaagtaagagataaacaatgtttatttttttaatttttctttctttttttttttttttttttttttttaggagtctcactctgttgcccaggctggagtacagtgatgtgatctcagctcactgcaacctctccctactgggttcaagtgattctcctgcctcagcctcccgagtaactgggattacaggcacccaccaccacgcccagctaatttttgtatttttagtagagatggggtttcactatgttggccaggctggccttgaactcctgacatcatgatcagcccaccttggtctcccaaagtgctaggattacaggcgtgcaaacaatgtttttataagtgctcaagcaggataatactactgataacagatttataggctagaaaaagatgtttttggagctcaaagttctaaactttgtcttgttaccatttattatgtgactggaaaagtcatcaacctctgatcctcagtatcttcatttataaaatcagaataatgactcttgctgtatttatatttcctcgtggttataaacttaaactactgcactagtactattactattagtactattattactaattactactataatactaattccaccaataattgaagctttctatatgccaaaactttgtgacttacttttcacacctcgtagctgtatcaaaaccttctcaatagtcctgtcagataactattctgattttcttctcacctcagagtgattaaataacttgccagaagtcacacggctattaagagcttgcatggaaatttgtatccagatctgactccacacttcattttagatcaattatatcttgttttctctgatgtattatatgtatattcatatacaatatcaacatataatacaaattatctctataacatagatatattattcattttatatacgcacagacatacacttatgctgtgaattctgaaatgcaataccaaggctctcttttctttgttttttaatttcaaagcctaatgaataaaacaaagtaggtatttaatcaacatttggggaaaataaatggatataacagaggtaaaggtaactaagataattttgagtgaactgttcattaacaagtatgtcagcaataacagtggctatttaaaccctcctcatcttcaagattatgttactaaaaattactctagaagacacatattgtatgacactacttatatgtggaagattttttaaaaagttgaattcataggaacagagaggaatggtggctgccagaggctggggtgtcagagaaaagaggagatactggtcaaagggtacaaatttgcagatagaagaagaagaaattcttaggacctaatatacagcatggtgactacagttaataatactgtactgtatacctgaaattttctaggagtgtagaacttatgcattctcacaaaaaaaaaaactatgtaaggtgaggaatgtattaattaacttaattgtggtaaacatttcactatgtacatgtatgttaaatcagcacatatactttaagtatataaagtttaatgtgtcaattagacctcaataaagctgaaaaaattattctacaaaaaaaaacatggattttttttttcaatcatttaggttcaattctaggtacaaggttgactgatagaaaagcagctattttcaataaacgagggctgaaatctaaccctgcggtccaggtaaaaggacagagaaaagattcatttaaaaataacatatgagtactacttttcaaaggatgaacatattattttccaaatttaaatcttccaaaaagctattctgtaatttcctatcaaaacaagataacaatactttgccatatttcccttgactttgtgtaataataatgatgatgataatcaaatagtgacattcaaaaataacaatttttttttttttgcagagttcaggagaagggtgcaggaggtattagaaaagatgcacataggtcttatatctcatcaaagcatgaatttccaactcattaaaacactccattctctgccctaatctcycaaagagcattcagctgaatgaaaagctgctgacattcgtgccagttcacagctagaatgacatggctgggggacaggagatgctgcagtttccattatccattgaacaccttggcaattcttaattcatcctgtgaatgtgatacttactcttgtactgctctggctatggaaagggccgtagatccagtttcattaacgctatctaaggtcacatttggcaggtcatcatcatcactgtcacttttactttgtctgggagataggcctcgggggtccatttgtgctggagagaaaaggcatatataatgaattaaaatcagtgcgcagaaagttaaccttgtcctggaccaacatcaagtatggaacttctgtgcatrtcatgcaaatggaattctctagacatcacaggaatcagtgaaagctccaggttttatgttctgagtacttactgattctttttcccttcattggagttacaaaacctaaaccagctctcaagaatttcagggtatggttatagaatagaaactacgaaatccacaatattaccaactcctgagtggtcaaaagctgataacgtagctcctgagctactgttcaaccctctggtttctcctcctccttgcttctgctgccagagctctggccatttcactgctcattagcactctccctggaaggtagagagcatgcggaaaggagatattagttgcttatagctctcataataagttaaaagaacagggcttgcgtgactaaaagaaagtatacgtatttttcttacttcagtgaatcactgtttccaagttcattactactataaggtgggatttgaaggcataaaaatggcagaagtggtagcattttagaaatcttgtttatatgtgctaacagtgctcttgaactctatcctgttttacttttccagatatgattcttctccaatcgtgaatttgccaaagcaggaaacggcacaatgttctgacccctgttgaccaagactatcagatctttcaaatgagagggttacttactgtcaacatatgttaacacatatttttaaaaattacatttcatttccatctccttctccctgtgaagagatttagcaaccactgcccagaatttctatcagccctcgcttcacgcacaaactaggcatatcttttcaatgaaaagtaccacatgagctacacacccacactgttaaattgtatggctgcctaagatttctaaaaccaccactgcttgcgggggaaggcaaaatgcaggtgaaatcatggtcataatgacatttgggtacatttcataatttcatttttttggtctcaaatcactttttttggttactgtgtatcatacattacaccgaaccacatggaattgctgagaatgtaccatttttacccacgaaatggcaacttcggatgattgtgtctaatatttacagtctggctagaaaaactatacctagacggtttcaacatatttcatcacgtttctaactacacttggttaggaaagaatttacatctagtgaacctcgtgtgcacccgtgtatttgatacacatcctgactttaaatataaatataccaaaacgtgctttgcacaatggaagtgtttggtaaatactaaatttaaaagaagataattcaaataatataaagtaatggtcctcaaccaagggcaaatttgcctcccaagagacacctggcaacatccagagacattactgattgtcacaacttggggcgggggatagggagggtgctactggcatctagtgggcagacgctaaggatattgtagacattccaccatgcacaggacagtcagcctctcacagcaaagactgaaccagtccaaaatggcagaagtacccaggttgaggaactgatctagggatttaagagtctggacataaaaacgtgtcacagtttatgactttcagttcctatgcaactatgctctcatttcaacatggctaacaaggaaattgtcacataccagattatccatattttctggccttgtcttaaaaaaaaaaaaatcactgtcatgtgactctgtacctcctcaaatgttaggaattaggcaataatattcattaagagcttttgaatattttctttgtaccaccagctatgagacaaaaagactgtttgttttccatctgatctctggaggagatccactagaagagggatgttggagaaactgtagggcaaagcaaccagttccatcactatctggtaacagacagcttaactacccagtcactcgaagggcacttgaaggaaccattatcatttaagatttattttcgctgtaggcaacagaaattggctcaggctaacttatattaaaagggatgtactggaaagataatgggcagctcacagaatggaaggtcaagatgaacaaccaacactaaaggaacgtaggatccaggaatgactttgtgtaataatatgaattcagctaggaactcatagatagcttcttttggggcaatcctgttctagaatgattcatttaacagccattcacaactattcaaagccagccaagaaaatgaatatcagatctatctaagcttccaaatcacatattgtatggtgttgcatacacctgtaaatgtcaaaaatttaacatttaaagttgttgaaacatcatgcactacgatgcctttgccaagataccaaatttgcaaacagccaagaaaaaagaaaatattctgatagtaccattttgtccaagacaactagagctcttatagtaagtaatacaactcaaggaagatagaggcagttaaccatgagcaatctggctctgaaagttaaagtctaattgtatgaaagattccaaaaccttgtgtgagagttgttacatgatcatctaattatgttatgtttgtatcttaatgaaagtttaaaatatgttaaatatgatatctttttgatgtacttttcaggagcataattgaggatttctttccaatattttcaataaatattatgaaatacatctgctaccatcatgctgggaaaatctttttacccataccttcagccaagctgaggaagtaattagaaaggcttttcaaaatctgcattgctgattaggtcagatgattagcttatctgcatacttgcataattccactctatttttattaaatgtagaatagggacatcaaccctagttaacctccatcagtctttgagcatctcagcccatttaggaaggactgattctctggcatgcccatttaaagaccaaagaaagttatctggacaccagaaacaaaaaaatatcagcctctgtaagtaagagaacaggagatgatctataaacacctgaaaaaaatttacacttaagattttattgctctttaatgaaaaagggatcagacagttttgggtaacccagctcactgctggtagaggtgtcattcctcggagttggaggtgttctggaatcctacgtgagtttcattccatgtgtcaaaatcctggggagaaaatttcagaacccaacacctgaagttgaactgatatactctgattttcaaatactctcctatggtagattgttactataacgatccctccaataaatcatgtctgtctgtatccatgccctgatgtggccacttctcaacaatgactctgggcttggctctaagacttgaagtgaccaatgggacattagcaaatgtgacacaagtagaggcttgaaaagcacttgcaccttgggtttccccttttcccttgctctttttagaacctagtcaacttgtgaagaagcccgggagagcctataggagacatgctgctcagcaggcggccaatcccactgtgagccatgtcagtgagccattttagactcaccagctacattacagtcaccagatgactacaccatgagtgaccccaggtgagacctgcttgaaaacctcttggctaaacccatgccacatttctgactcacagaatttgagcaaataaaatacctgctgttttaggctgggtgcagtggctcacaccactgtaatcccagcaccttaggaggctgaggcaggaggactgcttgagcccaggagtttgagaccagcccagacaacgtagtgagacccaacctctacaagaaatttaaaacatcagcagagtgtggtggcatatgcctgtagtcccagctagttgggaggctgaggtgggaggatcacttgagcccaggaggttgaggctgcagtgagctacgatcacaccactgcactccaggcctgagcaacagagtgagatcctgtttcaaaaaaaaaagaaaagaaaaaaaagaaaaacaaaaaaaaaaaagaaagaaaaagacaagacttgctattttattccactaaattttagggttagttgtagggcagcaataaaaagttagtgcaccaggttattctcccagctccttctagagatttcctagcaatgatggagatgaactacaactacaattacagtcagcctacaacaatattaaattgaattaagtttggcctaaagctgcctctatacatgttttaagtttggcctaaagtttcttctgtacatagtgaactgtaacctaacttgacgtggaaacagaccgtaacctcctcttgcaacaagtagctgagtttcggtcaatcaaagatggccaactgttgaaaccagattcaattaaggcatatgctgcattttaaccaacggagctgtctctgtacctcacttccattttctgcatgtcacctccttttctttggctataaatataatctgcatatgccgtagggtgaagcattctgaacatttttggtctagactgttgtctgattctggaatcaaattaaagccaattaagatgtgcaaaattagatttgtttacttttaacaacattcttctttattctcctcccaagaaccaaccttgttttagtgacataaaagctacctactgcattctgcatcatttacttttcaattcaaaatattcaaatgtatttacaggtgttttggcttttgcagtatcttctttgatccttcagtattgtgcagctaaggttcttcttgggccctaaggggccatttagttatgatgaacaacacttatttatttttatttatttattttcagatggagtcttactctgtcacctaggctggagcgcaatggcgcgatctcggctcactgcaacctccgcctcccagatttaagtaattctcctgccttggcctcccaagtagctgggattacaggcgacagccactgcgccggccgaacactttttcagctcttctcctcagctgagacttgataggatgctcatatgggtgggttctcactggtgtatggtcacccaaaggtatatttcatgttttttctcttcagctcacatgagacatttaaactttgcttgtttcctcccctcatgtaatagtagactgacacagatgcaggggacactaattcattctcacctcccctcaccccagcctgcctgctgtctaaagaccaaacactcttctaacttctgttgaagtaaacttgcctatgcacccactcttaaggaaaaggacattcttctatttctataggttgcaatattaaatgtgtacgacacaacaatctaagaacatatatgaaaacttacagactaacatttcctaacaggaatgaatcccagaagcagatactgaatcccttcacctccacgcgccagggctggagaggagagggccatacacagatggaaggtgtgaagtggctgcccaggcaggcgccacagggctgatggacctcttttctccctcttttagctacggacaggctccctgctatctgcaggtgccctaattgttcgccctgccaaggctgaaacatgtcccagttagagaaaccccggcttccaggagagctgctggtttattctagaaaggagggcagagggggagtgcaggaacaaagggaaaaatgaatgtttggggaggaatgtttgggaaaattcatagtatcagtaggtagaagaatcctcctccaacacattctatgcagaaattgttccagaaaaggagggtcaggaagcttctttaggataaaaacatggctctggcttcagggaacatgggatgacttctggccctgtcatttgcaacatctgaccttgggcaatgattttgcaccgggaatcttcagtttcttctcctgctactgctgctctaaggagtaaagaagataatacatgcaaagcacttagtcctggcctggctcttagtagtcaatcatcattccattttaccctgacagtaaatttactgcttcttcactcattcccttctataacactccttctaaatctctcaccatctcctggactattcaaattaggcagttttcttttcacgtgtacctaaactgaaaataccattacagaggcagaacacatattggataatatataaaactactacttatttacatcatttatgtatttagtcaacagatatttattgaacacctacgaggtagcaagcagtcttctggctggagaaagaagagtgaaaaagagtgaacagattaaaattcctgctctcatgctgcagagatacagatcattaacaaaaaagaaaaatatatactacgtcagatagtaagtgccatatagaaaaatgaagcagggaaagcagatggggttgcatagtggcagtggacaatttttgagatggtggccaggaaaggccacatggagaagaagatacttcagcaaggacttgaaggaattgagtaagagaagcttgcaggtgagggtttttgggttttgtttgtagggtgaggggcattccaggcagagaagataacaggtgcacaggtgataaagtaggaatgtgtttcatgtgcctgaggacctgcaaggaagctgtggctggaaccaatacagggaactggatgaggacagagagaggaggcagaggagggcatgcagagtacagagggccttggagggtgacataggcttttgaattttgctctgggtgagaagggaagccattggagggtactgagcagaaggatgacatgatacaaaattttatcatttgataaggatccctctggctatctctgcctggagcatagtgggggattcagctggagccacacacacaggaatcatctatgacattaacattccctaaaaacaacactagctttttttctccttggtcacctcctgctggctgcacacagaatcagttaaaactcaggacttggttacatcaaggtctatgtggcacgtccttcctaatatatttgtacaagtgatattctgacttcatttggtttcagaatatcagttgttcaaacagactattttcctagcacatcaagacagatagtgagagaaacattcatgagtaaataaagcttgactcaaaggacggtgaactccaagattagaaatagctctccagggtcctgttttgtttactaatgtttcgacaatgccttgtttcttgtttcctttacttttgctaatgctaatgcctctacagagcagcaactgtgatggccataaccccagatgactatttaaaagttcaatcagttatgtaaatcttgggatgttggtactgtgtagatataatatgcaatttactcatttttcccccaatttttgtctgttcacttgacagtgtaatggcttctgctaccattatattaaaaaataacctcataatgttcttataattccctagtgcaaggtccacttctcagttgtaatgctgttggacctctctacagttttcaagactgttggttattccttttcactttcatttctggcttcttcttaaaactttcttctcccttggcctcggggataggcaaattaagccctgtgggccctgccacctgtctctgtaattaaagttttattcagccatggtcatttacttcatatctggcatctttagtgctacaaaacaggattgagtcgttgtcacagaaactgtaggtctggttataaaatactatctggctttagaaaaagtatttgctgactgaaatacattattctcttgggcctttgtctctctctggttatctatccttctaacttcttcatctcctttctgtatacccctaagtgttagttgctgccctaggtttcgctacctattcttttctgtctgcctctttattggtgagcttctcagcaattccaaagaattccataatttccccaatttcaattgctatctcagaagggatgaataccaaatcaacattctcagctctgacctctcccctaaacaccagtctcatttccagcatcctactgactagtattcctcaaaaatcatttcaaacacaagtcctattctttctcctggtttctgagtttcagctgagagatccttttcccagtgacccacgttccaaactttgattcatttcatttgtgcccctcattaaatcggatgctaagtgctcttgcttttacccaatgattattttcttttcccactgcttttcatcgacttccttgaagtcctattgtacaaattgtcccatggagcatttctctggtaactgaatgtatgcagggctttccttaagacattccttacttagaaatccttgactttttcccactgtctaccgaatatggttcagcagccctccgcatcctacaactcattttccactgggagcaatgatgagtcttatccccgaagcccctgaatccagctttatctagccatttccttccatttcacaattctgccaccacaatctacccttcctacagaataataccttcatgacccttcttttccttctctaactacatgcatctctcctttttaaagaatacctatactttgtatttatatattttcatggcatttttgcactttccattttgaattatagttaggcatacacttattttgtttctccaattatgctgtttactccttgagaggggagaccacgtcaattatactcccttgtacacagtaaaatgtaaagtttaatgcagatctctactgaaaatgatcacagtaattcccagctgatgagagattctgcaatataatgatgcaagtgtctagctcacatttcatttaaaaaattacattctgacttacattctaatattaacatttgtgagagaaaagtcacaatcattaaatttctattattctctgaagtcttagattatatttttggtttgggatgacatgggaatgaaaacgttcataatttttattcacttttcagctaaattccatttaatgggctttcctttcaggaaatcattttaaacactaccaaatacctctcatttctatcacatgaattaccgcttggaaactaaaatgaaggaatttcatccttcatcctagtttaggctgggtgtggtggctcatgcctgtaattccaccactttgggaggcccaggctagaggatcatttgagcctaggaattcaagaccagactggattactaagtgagactccatctctattaaaaaataataataaaatataacttaaaaattcatgtttttttgaagtcacaacagctactagagtttcatttttctaaagaatcatgactaagactacttttcttgtttataaaaagaaaatgaatagagatttacaattgtcttgtttcctgaaagtacgtcttagagcataaaaggcttttgtgatttctaaaagttcataaaattttccattaataagtaggtttttccactgtgtgtgcttccactaactctagagctggccaagagccctgaactctaggagccctctgagatatcaccacaccactattccccataacctttgccttttgttcattcattataactgctccaaaccaagccaatcagctcaaaccgatttattcaaaactgaaactactataggcagagatgtaaaataataataaagtgattttgtggtacacacatatggagaacaatgagatcaccaaactcattttcatctgcaatgtacagagaaggttttaggcattaatccatggccattttattcacttttcttatttcccttagttggtctgttgcccctatctgtgttttctagtttgtgtactgagtaaaatggaatcttttaaggcagattaaaatctgttataataattttaagtatcaccaaatcacagccctagtcttaggtactttaaatgtaagaaatacttaaaaaaaaaaaagagcaaaaaatccacctcgaacttaagtctgcttttatatcaactatgctatatacagctagatggtatgtaaatgatttaccacagaagggttctctgctagtttcaaagttgaaaagttaaaaaagcaaggggtgggcggaggcatgcagaactattgtgccacatagagaatcagtgttgctgtcttcctccaattagtatgctctccgtgcctcattttagaatatatttaaacctgcaaggttaaagataagtcttgatacataatcatgattgaattccttttagaagcagagtagacgttcttgaagatatggtctaagactatcaaaaatcctcaaaattgagaattatttatatacatactgttggacctttctatagttttcaagatttggttatctctcttcatttgtagttctggcctcttcttttttttgagagagagtttcgctcttgttgcccaggctggagtgcaatggtgtgatcttggctcactgcaacctctgcctcctgggttcaagctattctcctgtctcagcctcccgagtagctgggattacaggtgcatgccaccatgcccagattttttagtatttttagtagagacagggtttcatcttactggaaaggctgatctcaaactcctgacctcaggtgatccacccgccttggactcccaaagtgctggggttacaggcatgagccaccgcacttggcctggcctcttcttaaaaactctcctcctctggcttcagggatggacacatttgtccctacaccctgaacacgtttccatcaagaattacatatttcttgtgtacatcttcacatcacattaaaaaaaaaaaccctatcaaagttttctttctcatttgatcggttgataaacacgtatacacagagaacatttccacccacacttcacaagagttactgtgcgggccacaggcagagaacacaaagtgccattgagatgagccccgtagttgtgcagtctcactcataaactgacccccggtgcataggattctaacttggaacttaaatataagcgctatataacagacttctgggacactggaaagcagatatcttagatgttgtatctgtgaatgtcagggtctcctctgctaaaatcatgaaatataatttttctttttgagaacaaaattaagtgctgactcttcacttccccagtgcattcctcaggattgtcccatcctatggtgaatgctgtcactattcaaaaatgactgggaatatcttcgagccaaaagaacagtattactgtattttttttcctgtgtttcaatcttggttgaaggacgtatttgttcatgtcctcatcttataccaactccgaagagaaaaatttactctgtaaaattggatgaaaggtcttttccacattaattctgtttggtatgcttttataagaaagaacaattccattagtccgcatcaatctattagaaatatagatttctaatttcaggctgggcgcggtggctcacacctgtaatcccagcactttgagaggctgaggcaggtggatcatctgagatcaggagctcgagaccagcctggccaacatggtgaaaacccatctctactaaaaatacaaaaaattagccaggcgtggtggcgtgcacttgtaatccccgctatttgggaggctgaagtaggagaatcgcttgaacccaggaggcggaggttgcagtgcgctgagattgcaccattgcattccagtctgggcaacaagagcaaaactccgcctcaaaaaaaaaaacaatagaaatatgcattctctgtgttttggagtttgttaaagagatttccatattttgtaacagtgccccccttctcctgcccctgttatgataaattggctagtctctgtgaaggctggtgaggtttccacgaactagaatggtatgacttccttgggcttcaggtatggccactgcattggagtttgtttggtcagaccacttcctgagcccaggaactcaaggctctggcttgtttagggaggtggcagtggcagtatctccggaaatgactcttgaagaacaagatcaaagttaaaattctgtctcgagacagtccaggtgcagcaagtgagaacactgctatagtatacactataacaccaagagagcataggaggtacacactagtcttctctgctttcccaactttaaactgggcttacactaacttctttagaaagcccattttggttttgtgaaaagagacattttctaaagaagataagagctatgacagaggatgaggtcttggcctttgccaggcaaatttctgataaattgcatggtgcttgaggttgctgtgtgtagttgtttaataaatagaaaggttggatactgtcttttgtaatataaggaaaacagattttctactgaaaaaaaacagagaaattcataccgctctaataatatgtattctaaacatcatctggccttgatttccttgaccaaagatgccaggttacctccactctaagcacctgctgtccctgaggctagctgagatctgagatccagggtgtctcattacaccccaaccaaacccatctgctaataagagagtagctaagctttctacatgcctgccacatttaagctatcaaataagatgtcaggggcaaatcaatcattcaacatttttttttttttgagatggagtctcgctctgttgcccaggctggagtgcattgggacgatctcggctcactgcaagctccgcctcctgggttcacgctattctcctgcctcatcctcccgagtagctgggactacaggcgcccgccaccacgcctggctaatttttttgtatctttagtagagacggggtttcaccgtgttagtcaggattgtctctatctcctgacctcgtgatctgcccgcctcggcctcccaaagtgctgggattacagtcatgagccaccacgcctggcccttcagcatttttatttatctcatttctgaaaggagaactccctaaatcttgaaaatcatttcttcccactgtttctcacatccaactattcttcatataaaagaaaatataaacaaccatttaacatagggtctagtacttgctccctcattaactcgcttataaacttgttacttacagattttctttcatgtcaagtcatttcttagttaagaaattccaggcttacataaaatggctatttattttcccaaaagattcaaaatatctaaacatttcgtggtatttcttttagatcattaagttaaatatcacagaaagagctgaaagctcctttgtatttttttaattcctattttgtttccttcttccacagtattctggtgtatatccttcccattcatatttttggcccttaactacatatatgtccatgaacaatacctacagttttgctctttttaaaatggcatataacaatatcatatctacacacacacacacacacacacatatatatttttttgagacagggtctcactctgtcacccaagctgcagtgcagtggcatgatctcggctcactgtagacttgatctcccaggcttaagtgatcctcccatctcagcctccagaatagctgggactacaggtgtgggccatcatgcctggttaacttttgtattttttgtacagatgggtttcaccacattgcccagactgatcttgaactcctgggcttaagtgatctgcccaccttggcctcccaaagcacaaggattacaggcatgagcctccgcaactggccaacaatatgatatttctatttgattttttcatttaacattgtatttttgagatttattcatactctttcatttaatagtaaaagataccattttctaaatggagcagtattagttatctatccttttcgtgatgaaaaattaatttgttaaaaatattcactattacaaatgctgctgtaactttcttcatagtatacatctgagaattacggggtgcccatatcaattttaccaaatattgccaaattgatctccaaagttgttgaatcaatttacactcacattagtatgtgaatacccacgtttccccatactgttgtaagacttaatatttccagatattaaaatttttctgaagtctaaaattattccatgttgtcaattctcctcccaaatacaagattgagcatgctgtaactatccaaagaacactcccaccttccccatttatcatttggtccagaattttttatttctatttttatttattttttattttgagacagagtctctgtcacccaggctgtatgtagtgcaatggcgcaatcttggctcactgccacccctgcctcccaggttcaagtgattctcctgcctcagcctcccagggagctgggattacaggcacccatcaccatgctcggctaatttttgtattttcattagagacagggttccaccatgctggccaggctggtctcaaattcctgacctaaagtgatccgcctgcctcagcatcccaaagtgctgggattacaagtgtgagccactgtgtccgggcccatccagaattttggtgcatgttttactatcaagagttaattaaaagttatcttcatgcatatatttatctacatttttcaaaccagttctaagctctcctttccttttgggtttttctgtttgcaaaggtatattctttatgagtcttatcagcataagactcatatgtgtgggcactaagctctcagtcaatgtatgtctgaattttgtttttttttaatttcactcttaatggaattttatttcagcccagtacagaatttcaggatctttcagccctttgaggagcctattgcattgctttctggcatctgttggtgcccaaagtcttttcattcttaaattcctttgcagacaagcttttaagattttgtttagggaactcatgcttgacaatttcactgtactatatctagatgtgagttgatttttactgagtttgtctaaaatctaagattcataatctcccttaatttttccaaattccaagacatctctctgaaagttgcgttctatctattctgataaatgtcattttagatatacgtcttttagatataatgtctcttaacttttctttcatgtttttgtcagcttttctacttgtgccagaacaagaacctgggcattatcctagatttatcttttcctttatccttgacatccaactggccaacaaattctatcacatttccattcacaccaccctgctcaggctctcaggaattctcacgtggcttcctgaaatagtctccctccctgtattttcaatacattcaacccttcatgcccaaaactttaatgttaccatgttaaatcccatctacttccaagtttcctatgcttccctgtagagttcagtaaataaatcgttagcttggcacagaaggtctgtgataactacatacatgaatactgcccttaagcttcatttccgcttcttttaagtacttttcatttgaacaataccaacttatctacttgtcgaatctatctaccaggatacagtatgcccttttgtatttccaagagtgcattttttaaaaactgcccttcctttcctccattgttacacagagaatgtaactaatactttcttctgagaaacagccttctcctgaagtgatagccacacctcaccgccacccaacaccaccaccgagtatactgcccctcttcctttgcaatccacctctgtgagcctgggttcactggattacagagcttgtctcactgtggcttttttgtctgctttatccatttgactgtgagtgtattgtgggtactgtacgttgtgcatgtggttaaatcatgaatgtgtattaatcacatgaataagtgaatagaaagaaatacactgcacaattcccgggtaaagcaaaaggctgaaaaattggagattaaaatttaaaaaagaaatcttaatttttgaatctggcaggccaaattttatttagttttgacagatgagtcagagagcaacaaacaaaataaatcagtactgtaatcaacatatctgtttaaataataaggatatttttctcagatgttacaagatagaggataaaattcaagagttttataacaagtcaactagtttcatttggtttataaagttctaggtggtatcattttttaataaaaatatatacatgtccacatatatctgtctctgtatatgtgcatttacatttatacatagatgcataaataaggtctagtaccaagttcttctctgagcatattctaatatgcccgggtatcagatggacactgcattctgaaacttacaaatatgcaaggcctctgcaaattctgactgcctgaacaataacaactgactgaatagtaataatatggctgagctccccagtatcttttctggaataaggtatggaatgaataaataatgctaaaaaagtctgtggtggcttactcttgctattaaggatgattgcattctcaacgttcttcataattataaatatagaacacaatactgaaaaatagttataaaccattcagtggcttatttagacttgtaaatggacaaaactgtaatcctctgtttatatcagatcacacaaaattatatagttaaaactagtgtaaattatgattgaaaggaggtttaagtatgaaggacttatcatggtgactattaaagtaatcacaattggccaagacaggcaagaaatgtgcttgttaatagttgcattagttgcaaggtggataatgagataataaaacacataattggaggttatactatcttgattactgtagattataccaatgggcacaataatgccactaagcagtgcatcaccagtgagcactcatttgttagatgataaatgggtaatgatctactataaccataacttccagaacgtgacagaaaatacttcctatgacatatcatgataccaacacattttggacagcaggcaagatctttcactctttgataaacttaataaataatagagaactacaaaaacagaaaagatactatatggctctgaaaagacactgaaacaaaaactggaaaatgccagattttactatgaagctattctccataaccaaacacacactttattgaattcattttccaattttgaagaaggcatttctgaacatctgctatataagcttggataattctaaaactgtaatgttataatgattattagctattggctagtgctcagaattttattgaactcattaatctaagaaaaataaatataattataacagtaataataaatgttggccgtgtctttatttttgtagtttccccttgtgtcttccagaaaattactactaccacaacgaggcaagatagaacaggcgtgtctgtgttgtatatgtctttctaaccaattccctgctcaaaagagctctaggcaggggccagatatgtctaaaaatgacatggatgtcgatctctgaaacgcagtgaaccacactttgactaaatttccctgcacctagaaatgttaacctacagcttaaggctgttgtttttcaggctgcaggatgctaaagaaatgaaaatacatgatacagtactataatatcaatatttagcaacatggaattacctcacgcaattcatacacacacacacacacacacacacacacacacacgcatacttattttacatacagaatagatttcatatataataaattttaatccttgtcaaaaaactgaatgatttaaaaacataatgccacctaatttgaggaattatggaattggatatttaaaactgacacattctctagataattaaggcatactttttaaagcatcaagcctaagtacagcaaaatggctatggagtatttagaaattctgacttaattcaaggctctaccactcttaagctgtgcccttataagtggtacagaaagtgatatgagtcttagttttctcattgcaaaacactgacaataatatctacatgttggttattgtcaggcttaaagataacatatgtaaagcagaaagaacatataagcactctataaaggttatttaatattatttaaatgatttttaataaatatatttacaagatttattacatactttgctacctttttcaaatggactgatgataatttaacctttctttcattactaatggtcattatttcaaaagcaattattacgctgtaataaagtattctctccaaggactaaagcgccgtgttagcctgtttgctcccatccagaaagaccttgctgcaattattcaagttcttgttttaataataattttgacgttttctttgctggctgccacttttttaccctcagtgcccctacagataaagggagtttcctaatttgggaagggaattggcagatgagaatctcaggaggtattcagcatctataaactggtaaagcaaaatcagtagatctattttctttcagtaacaaaatctacagaaagagaagtgctacaaaattttgtgactattgggcatccataaaaatctactgagaagacattttggggaacccaagttataaaaataacgattgagaaatattcctatcacttatttttctttgcatttttatttgctattctctacttacgtggttagaaaattatattcacaaagaacataacaaatatatccaagccaagagttaaaatgctttgaaagacggaggatcttgagtcctttcctataagtaacatagagtacatgtaatgtagacaacatattttgtatcatatgcagtgtctgtgtgggaggtgacctcatgggctactttccagtacaagcacagtattcctcattctttgtgtgccctccattctctactctcattatttactcttttcctggtctgaaacactcctacctactttgagtaccaaagctttacgcttctccaactttcgcctcaaatgccacctactctccccttcttataatgtaagacttcctccagagtctagttcatgttctctggagatttacaacctaggcctctagaaggtttcctctgtttaaaaggtctctgtgtttacagaggactgattcacagcattcacgtctgacaaaggccacaccggagatgattagggggagcccttggatttagcacagaagagacaaaaaagcaatcaagaaattgaaaatgccttctaaacacagaacactggaaacaattcagacaaagctattttagattcgtgctgcggtttacttaatacgtttttaagatcagagaactgaggaggaaaaccaaatctttgttttatggatgcaacaaatgggcccaccatgctaaatacatcatttattctttctcacagagagatatttaactctgtggtacaaataaaagtagcaaagtagcatttcccttctacttaaggtttgttaaaggaaatttatgcttttaaaatgctctacaaacaccaaaaactgattgtaccattatcagcttttaaatcaaaacagcttgctatctgctaaggacaggaaaaatggtcgatttatttcataaaactttatgtacaaagagacactgcctatgaacttaatggagagaatatagagtctggagaggtaatttttattacaatttatagtgggattactcatactccacagttttcagattttatggcatcatgatgctgatgcagttaactgcagtggggtaggaggcataatttgtttcgccctgagtgggaaatgaaattggcgttactattatataagaaacttagcagattctattaattgcctggatccaatcaaagctattagttatcctagtttcacaggtaaaatattttacctgagagtaaaagaataaataagaactgactacaattttcatacagcaatatctacgtattaagactgtttggaagcccaaagaatatttcttacccacaggagttcatctccagaaactactaaaacctaaatcacatcaagtatctataaggtaccaccaaacattattctctaatattaagtgctacaaaataaaacaactagggaaacagcagaaacaatgtattcaagaacaccaggcgactacagattgacataccacagcaacagcttgggggatggtattcactcattctgcacttaagagtgtttattgtgtgccagatgttggataaggcagtaaggcaatgagaaaagatgatgtgtgtgtgtttgtgggggtggtggtggtatatgaattgccttacaatttggtatgtactgtttcagaaaagaaggcatttgagccagatcttttgtcagagaaagaaaaggcttccctttgctttctacatggataaaggtagaatgtcacctgaagggccacgcaacatggctgggacgtgagatgtatttggtggaatggcaacagactgagagggaggggtagtatgtgaggtagatgtgaggacgtgcggaggcttgctggttacatgttatgttttggcagcctcctatttcaccatgggaaggtttattctactgtcagggttcagactgcacgtctacactggccacacagcattcctaagcatctcacacaaaacactgttcctgcagtgtttcccacattaatgcattcatttcttcatccatctcttcagtaaatatttattgagcatttactagtgtcaaacacgatgttggggaaatattagctaatgaggcttaaatggtactttcatggagcttaaattgtagtgtagaattcggggagaacacctcctccccccaccacaacctctttattttagaaatgagcatttataacaatataaaccacattatataagcaccacagttctcagcagaggagcttattcttactatacgttacccaagtcctgctatatctttctctccccaaagaactgagaaacccatatacctagcaaagaattacccttcttctaattctaccatgctcctactgaactcctaagaccctagtatttgaaaaggcagtttatctgatgaattctccaagggctattcctagttctctcagttttactaagttttcctacattctgttttcctgaactctttctgtcccaagacataactgtccattgcatttattttcattttatcttattttattttacttttatgagacagagtctcattctgtttcctacgccagggtgcagtggtatgatctcggctcactgcaacctttgcctttcaggttcagccaattcctgtgcctcagcctcccaagtagctgggattacaaggcgtatgccaccatgcccggctaatttttgtattcttcgtagagacgaggtttcgccatgttggctaggctggtctcgaacttctgacctcaagtgatccacccgccacagcctcccaaagtgctgaaattacaggcgtgagccactgtgcctggtccattttaattttattttctctctctgacattctagggcactggtatccttgctcagtgggttcacctctcagcaaaacttcctagtagcacacaagttgccatatatacgcttccatttagccaacaaacctaatccatagttttaaaaaacactaagcacagatacacagaatgcagcatttttatttccactgaatagagtcacatgcaaatgtataggatgggaagtgggataagcgggtagaagttaaaccttttttttttttttggcccaaatcaaatatagtcctaaaaaattttcatactctcgaagtctaaaaacaaagtagataacttaggtctcgaattcaggtttgagttttacttaaaagggtcatattcaccacactgtcttgcaacactaaactagctgggaaaatccgggggcatggaagaaaaaataattaggggcatggtagaaaaaataactagattacctagagttctcgtgtctttcagttcatgtcattttaaaattctgccactagatggcaataaaaagactgtccttttcattacaggtctcatggttccatattacatgacttctggaaaaggtgatttggttgatatgaaagagaaaaatcaagactcagaaaaaggtagaatggtgaggagtggagggagacagagaaaaacaactgagaaaaggaagaagacagaaaaatggagggaaggtgagagaaaaaaggtgttagaactgagggggttactttgaaagggaggtgcagaaagggcaaggaaaagggaaggggctgagtgaaagcaaggagagatgcagtggggtctctctgaaactttttggacaggaaccacagtaagaaatacgtatttcagcatgactagtatatatacacaccccctgcccgcagtaccacatttgcatatatgtaaacaagttaatgaacaaaagtttcatggaataatatttatttgggtgacactctcagatacttttcaacctactccattctatttcatttctttaaaatcactcattgtgagctactaaactgatatccaaccagaaatgacccccagtgtgataatcattttagtctactgtaaactagagctggcttttaaaaagaatttctcttttaagtgccacagctaggactgggagatattcctggctttgtaaattgcccataaaacatttgttgaataaatgaactaattattaaaagaaaaaaaaaaaggtgaagctgcttggtcttgaaaaacacatacaattggccaatgatcaaagtagcatttcccctacataaaggtggctggagaaagaattgagtatgtgattatcacccagtaaattggtagctcttttttatttattggatagaaagacaaatatcaattagttgttttctaaagaatacaaagcagaatacccagttaatcaaatttccccattaacaaaggaaaacaggcagagtgaaagagctgagaaaatagtaacatagtctggaacagaaaaagaattattaagggagtaagaaaaaaacagggaacagaaaccacagccacagagttgtaaattattaaaaagccaatttaaaaccgtgctggtaatgattctaagactaagtttccctcttgaatctcatattcttccttctttcatttgttcctactaatgaaaaggtgtttacttactaaatatgttttcacatatgtatgtatttcttacagtgagtatagatgccaaaataattctacaaatacttgcaatctactatgtagaataagaattcccttgtagcataacagcacttgtactatatgaaatcagaagcatatttaataagaacataattccaggatagaaaaaattagttttttttaaatagaactattcacaagggaaataaaagatattacacatcaaaatccaatatgtaacattcaatgtactaaatattatcagagaaaacttttcaggtttggtgaaaaagtaaatatgtagattacattagaatactttaccagtaaaatgtaatttaatcatagaagtatttctttaaacacaaactaggtctttttattataggagaaacttgacctaataaataaaatagtgtgccaggttaccttattcggtagtacctaatatcaccttacaatgaaatgaaaacaaagcccattttttaaacatcttcttgctttagctgctttacctaacaaatggatttgactgtcctgtttatcttcacttccttaagtaacatctaccttttaaaatgatccgtcctgggtatccataccttctcctcttcctcctcttttctcctttaaacttttatttactatttaatgcagggaggtgggaggagctaattaaactcatttctgggcattttacagtctatgaggagcttagagttttctcctttctgctagctctcttagaacaatacagacagcttctgtctcctccctgcgccagttattatcatcgaatcttagaactatcctagtctatgccagatgaagcagcgaaatcgacagattgtaggcatttcagataaacaagagcgtaagaagccaattttttgatggaatctattcaacctcttgtgcatgcccagaagtgaaaaaatgcagataagtttctaccatgttgaaaatcaggtaaaaataaaccacaaatcaccaatgtatctgtaggaaaaaaaagggttctgaactcacagtgaaaattcaatatttcataaacatgggctgcctgcctttctctcactatttaacaagctcctatctttgttttgccataagagtgaaacactcaagtcttatcaaagcctatatttaataaacataaaccaaataacagcaatattccagtcccatttcccaataaacaacattaaaaaagtaaagaccataagtaacttgctagtttgtcgataaaaatcaaattctaaattgaagaattaacctatggctagtagtcaccatacttaagagtaaacagaatcaattcatcaagggaagcaaagataacttcacacataatcacaggtcagctatctaggactattctgtcatatggatgggtgacgccaggattccaccaaatggtgaacaaaagaggacagtcacatgtaaggtagacagaagcgagtctgtgacatgaacgaaatctctagcaactgagtacaggaaggattcatgacctgaaacaaagacaccaacaagtgagaacgctggcgacagaagaaaattagtgaaacaaagagatctgaaatgggaagttccatgggaataaactccagttgcatcaacgggacagaacctaggtcacaatgcgcaatgagttttgcagcaatctctgtgatgactgtattttctttcacaaatataaccagcatgagactaaaaatacacttgtggcttctttctataggctgctgagaaaagcaacagcctgtaggaagaaaatggggtgtatttcaaattagtctacagccacatccctttgaaactcctgaatggatgctatgaaaataacatatttttggaggattcttcaccgtgtgtctgtgtctaaatatagtaagaaagcaacattctttaaaagaagaagaccaaagaaattgcacacccaaattggattagtttcttaacagcagtatcaacatgttctactcaggtattttgggaaaagtacttcatactcaaggatctaaacacatgattattttaataagaaataatgcatttggacctataataagttattttttcaagtatgacaccatttcaataaaagtcttaatgtaataaatatgttttgctaaatgctgatagactctgcgctgctggtgttaaatttgcatgaaagaaaatgtgggatggtaggaaaccagagctgggctctttttcttcaagcaatctattttattaccgtcatctggacatttgattgcttttgtgtggctaaggaaaagacagaaatgtagcaaaaggggagaaatagcagagcatctacataagttaataaagaacaaaaggatagtggttaggaaagaaaattgggcaaagtaaaatacccacctggctgcaccaggcttctgcaggccctgatggtttgaaagccactgatcaatcacatccttgctcaagtctcactcccaggcatcaaggttaccatcaaggttactggctcaggtatagaagagaggagatgcgtccttttgtttttttctccccagatctttatttggctatgacattaactttttttttttttttttaagatgggatttggctctgtcacccaggctggagtgcagtggtgtgatctcagctcactgcaacctctatctcctgggctcaagtgatcctcccatctcaggctcctaagtacctgggaccacaggtgcttaccaccatacctggttattttttttttttttttgtatttttggtagagacaaggtttcaccatgtttcccaggctcatctcgagctcctgagctcaagcaatctgccttcattggcctcccaaagtgctgggaatacgggcatgagccaccacacctgtctgacattaccttctatgtatcttgaatttctaaaatgtaatacctattaatgtttaaatgtaaaaaaatgcctttaaaggacaaagtaataatttgggactcatggtttattttcagttatcctgcacattccactaaacaatgaagaaaaaatgttgatcttataatttctggtatcatttttataattatcaatggaactcaaattttacttttatttttacttgtttgctaataatccagtaaagagttgaaaatggacaatcctaaacaggaagaattatagaagcaaagtccttaattgcacgttattgcttatattgtactgtgaacacacctgcatcttgcagtaattaatctgaattctaaagtctatttattatgttgacaaaattgttaggaaaaagatacataatggaaaatgaaaggaactacaaaaaacagaagataatgatgtaggattattcctgatggcatataaacttgctatactatctccttcttttaaaacccctcccttgagaacctaatgcctctccagctctcattccatttctctacaactctttaaagcaaaactactccaaagaactatcgagactttcagtctcctcttcctcacctctcatctgaacaccaacttacttcaggcagtcttttgtccccaccattccactgacacactgcaggtcagtgtcaacgatgaacactccctcgccaaatgcacaattctcggtcctcattttatttggtccctgagcagcatttgataccattgacaagctgctcttgaaaacacgctccacctgcattctctttaacattactccactttcctcatgaacagatgagtttccatgctgactcttgcatccctcttcactttctaacctcacaatgctcaggtgtccagtcgtccatgcttctccttctccatttggctctcctgagatgatccctagtggtacccaaattttatttctccaaatctgtctcctctttcctctgagttccaggctcgcccacccaactcccatctcaagctctattaaaatgtggaacaggcatatcaaatttaacacgtcccaaagggaattcctctctcaaccccactgtgctcatcttagtagagaacaataggtcagccaaaaacctagaagtcaccctcacttcctctccttccctcatatcccaccatccgacccatactgcaatagtcccctttactagttcttcctagttctgctccttccccatattctttacagcatgcagtggttcaacgatttttgtaaaaggtaaaacggatcatgtcaccctcctgttcattctgaacccagtggcttcccaacatatttaaaacaaaaccaaagactgtacagcattgccttgagaacctaccagatccttcatttaccctccccttccctccccctacttaagcctctctagttccaccagcctcctagcagctcctcctcacaaaggccatactcactcatgcctcagagtctttgaacctgcagctctctctttttgcaaaggtcttccacagctattactgacacagcttacttctcagagaggccttccttgattatacctaaagctgtgcccctctcccattaactttccaactcccttatcatgccttatttgtcttcatagcacttgtagcatctgatacacatgaactgtcactgctactagaatgtaaggtccctgacagtagggacttgctcattttgggacaccaattcctagaaatgtggttggtataaggtaaatgcacactgcatatcggaaggaaggagaatcctaaacgcgcctgctcttccatcaaggcaataatgaaccaagaataactttgcctgagatctgtcttgaccctctatgccaggggtgtccagtcttttggcttccctgggccacaacggaagaagaaaaattaacttgggccacacataaaatacactaacactaaggatagctgatgagttttaaaaaattgcaaaaaaagtctcataatgttttaagaaagtttacaaatttgtgttgggccttattcaaagcagtcccgggttgcatacagcccacagctgcgggttgggcaagcttgctcaatgctttccttctattaaatattggtgaaagctaatgagtgtctcccaggaaatgtgccacaaacttacccaaaaaggacttaaattcctttgtgaggtcaaataattcctttagggttcggtttataaatatcatgtcttagattgcacagtataggctggtgcaagagtaaatgcagtttatgccattccgttgacaaaaaccgcaattacttttgcaccaacgtaataacaaaactctcctctctatgtgggaaccccgcacctcccagtaccaccactgtgggggggctaactgctacttgtccttaggtatcaagtggaaaaatgtcttccttgggagacgtttcctgacatcctccctctcatagctcaattctaaattatgtttgtttactataccttctaggacatcattccatttttcttcatatcacatattatatccaaggcccagtagagatgtcggggtgttctgtgctagctgacaacctgccattgctttagatcactattctttgcacacttggaaaggctgaggttctagcctcactagaaggcattttcacacttctcaggaaggagttttaaaaaaatctttgcatgccattctgtccttagtcaagcatcccttgcagaagtttcaccccaccccttcccaaaccctcaccactccatgagcatcacagtaaatacatgtcttcctagaacatgacatcctacatgaaaatactttggtcaaatacagctttctctatttgcgattataattaaactcattccactgggcaactccctggctggtctattttagtccaactctgtccacaattatcagttatttgtttctatgattatttcgtggaaagtcagtagctctcattagactgtaagcactatgagacagaaacaacatctgctttgcccaacactgtatctttggtgtcaataaaatgcctgataatgatagatgcacaatagacagctgaaaggacaaatggttcaactgacaggacatgtgagcttagacggatatgcgcattcacagtccttcacgtaatgtgacatgtagggtaacctatttctctatcagagaccagatacgttataccaactttaaaagtagccagtacaatcatctacatttatgcattacactttgtatttttattattagcattttgaaaatccaacttccctatcgtattttcctttgctcatgcataccagaaatacacatccgaagtaggaagggaaatgggggctccctttattctctcagccttcactactggctcaccgcccagctgcatatatgctaaacaaagaactgaggaattactgaaatgccctttcctttattcattctgtgaggtaggcaggcttcttccactagacagttttactattacctaattaatcagttaagcaataaaaaagtataaaatgctatagcaacatttgtagaatatggtgattataaaaacttagtataaactaataaaaatagaaaatatgggatgtcctcaaataatttctcatactaaactctcatcccttataatttgttattgtaaaaactttgagaagcagttccataccaatgtcttgaggtagtttttctgtttaaaattcaacaagtttttgttcctccatacttgtttttataaaaaagagaaaaggtttttgaatattattgattttggtattttttgggagagataataagtaatttcaatcatttattgataattgatggatgctagacatgtatacattatgttctttttttttttttagataagagtctcaccctgttgcccaggctgaagtgcaatggctcaatcttggctcactgcaacctccacctcccgggtttaagcgatgattctcctgcctcagcctcctcagtagctgggattacaggcgtgcgccaccacccctggctaattttttgtatctttagtagagatcgggtttcaaaatgttggccaggctggtctcgaactcctgatctcgtgatctgcccacatcggcctcccaaagggctgggattacaggcatgagtcatcacacctggcctatacattatgttcctaatcttcccaataatcttctaggctagatcatgttattatccctattttatcactaataaaaatgaagattagtgagattaaataactttcccatttacataggtataagtgacagagctagggttctaattcatacatccttgatcccaaatctcatattcctaatgaccatagcacaatctgcagggtttatacttaaatttttattcttgatatgagaaaactactgagtaaaaaataatgcatgaaacaaatatattcatgtagagaccaaattatagcatgagtcttaaaagttctactacaataattcattttccagaaaattaaattttagcaatattactttatatatactttcaaaataaaaatctctctcacaaaatgatcatggcaaacaaaaaaaatcacttttgtttctttcattagtgaatcaaaatggtatgaaagatcatgagcaacattaatatctttattaattaactttataataaaataatttttatcttattttacaaagattaggttctatcatgtacacatgtacacatatataagataatatgcaactttgcatgttttgctacttgttaatttcgaattcttaaaacatttgcaatatcatttctaaattgtaaaagaaaataaatatctgatttggcctgcagttatgttgttattattcaaatctgatttgttcagttcaatcagaagtgtcagcaatatcaaagagggtttggctcaggtaaaatccatgaaaagtttccctaattcctcttcttcctctacgttttcactagagaatagtgggactagctcctggaccattagagaacaaaggaaagagattatcaagtaagcaacgagtgtctgcatctcaagtttgcagtctaaaaagcctgtatgctctgaatcatcagattttagtttgattaaactaggaaggtgaaacttatttcacgtgtgataaagaaactcactgcagataaaacaataccttgctaatggtgaatgcacaattttgtaattcatacctgcaaaaatttctgtaagttcacaatcaatcaaatgtatttattcccacctcatacaagaaccaaaacaaccatatttactagcattttatgagaaggcagtgttttatgtactcatcgatcatattttaattacaggcctcagtagtaatatagtgtcaaagcaaaaagtaatacaacataaatcttaatccatcattatttctaggctctgaaggcaaagtacatacatattatttactttaaaagggaataagtcaatgattatgggcattctgcatttctattgaggggtggcttggtttttagattcatgggtagtgaagaaagagaaaagacagcatgatgccaccgcaatttcttctagtaaaattcagggaaaaaaaagaacttagaagaagaaaataacttcatgaccagctgcataactatcaaatttaatgaaataactagtgatgattacacatagtcatgtagcaaagttatcttcctgccttctaccctaaaagggaatattaatattgcatcttgaaatatttccagtatattgagtcatcctgtcccttaaaataataacttagccttataagaagttagtaacacaagctacatgatactactatagtcaaacacctaattctagaattattttaatggcaacttaatttataggttactcaaaagtgaatgattagattccaggcactgcaacttcacaacattgtatattattatcacctaaataaattccaactgaacaactcaacaaagaaacatccggatttacttaaaaaaatttacaattcataatcagtaatttatacttcataagcaattatgttcaccatagattgccctttccaactgaggacttaagagcatttcaaagcaagtattattttgcaaacttagatatctgaattctaacattacgtgacctatggtaagtaaaaatacactaagcaaaactggagcatatacctacataaacatagggtgagttccctctaaactgtgttctacttaaggctgaacagctggtgtctccacgttgctctacacagaacttctttagatgtagtgtttgtatacaatttaggttttgttcactgcaaaaatgaagtcacctctagtgctgaaataaatcaaggcttgtttatgtctcttacctttgccatggcctctcccatcctccaaaagcggcacgacaatagtgttgttcacatttccaggtgaccttacagctgtgtagacaacaggcaccgactgtaccaccacggggatgcggtgaacatgactcagtttgttagactgtaaattcatgggacttgaaggcggtacgggatggataatgtgcaaaaactgctggcctccaacaccagatgcagaggccacaaggggccctggagttaatactgttgacgaagatgacgctgaagatactgatgtgataacagttggggatgaggctagacgactagaagacgatgaagaggttgaagttgaagaaggtgaggaggcagatgctgtcatggaaactggggaggatgaaacggcagtaggggacgtcctggctttgtttattgacaagtccactggctcagtttgtgtttggaagtgatctacagataacgagtcctccgggggctcccctttcacattatttagcaacaggggaacggcttccatatcgggatagttgtggacgtttggagactgtggggagaaaaatggaacatatatttatctttgtttatcacacattttatcgatgcatggcttaccacttgaacgtttattactttttctcttattgctatgggacatttattcgttctccaaatatctgaaggattgctcagagacagtcactgtgattaaaactgagggcataagagtacaaaacagaataaggcctctaccataaagacattttcattccattgggacagatagacaattattaaaatactatgaaatcagtgctctatgaaggagaaaagaggccatatgaatctctaggattctaacccttactcaacactatcacaatacggaaacatattacctggcaacaatagtgggaaaactcactatgacatttctactttcatacttgttgcaagagttaccataccatactcagtatattctgagcattaaaaaagggcataaagttcttcaacctcccacacctgatcactaatttattaaatggaagtcatttctaataattagctaactcttctcaaaataatgtgcacaactacaagtgacattttaggaaataataatttaagaaaaacttatcctgaaaattataatttgtctatgaattttcatttaatctgaaataatgatgataatgttgttcaagttcacctgcactcttttaagttttaatgagcaaaatttgataataatagactccaagattttacccagactaatgtgatcagcatgctattatttgcatgaatataattttactcatatatctattcattcataaattcaacaaacatttatgaaatgtctgcttgcaagtccccaaatggcataagagtactattagtggtgtcagtctagactaaaaagagagaattagactctactgattattttggttacatctgtttggccaggttaacatagacattattttcccatttatgaggaacaaaaactttttttcactttttatggatcagaacaatacctaaaattatattaaattggttcattttgttcctcatttaataaaagattttggtgtgctattccccctaaaacttcggcatacatttaaaggaatgaaacatgtttcctaaagcctttttaaaatagaatataaattacagctccattcaaaacatacaataggcagtagcacacgggcattttactcagcaactgagaaaagaaagaaaataaatcagtaatggtaccagatcaactaaaataggaaatgggttgatgttttaatgctgtttttcctttttcttagctaacatggttacttacctataaaaacaaatgacttagaaacaattaaaatgagtcatctaaaatatctactgtatgaaattctaaatgacaagattttcagtttatgtgctgaaattgagaaataaatttttaatcttttcaaagacatttaaaaaacaaagaaaaaacaaacaccataaattgaactgctttgataaaagctattagcattatctactcttgtaactagaacagtatttcaatttcagcattatcattttatttctttgtagaataatgcaaaatgtttcttattactatattatacccacatagaaattctttgcttaggttgctttcataaaagacatcaactagtttgtcattaaaagataaaacatatcagtaagcacatattattaaacaccactagtttgactttaaatatagtctaggtaagtttttctccttttaccgtatcaacatatcaaaaattcttattttagagagagtgattacttccaccacaaatttttctcctcctgtctacttagacacaagattcctacatacatttacaaatcaaggagtaaagagtacatcactgcagaaatgttctataatgtaaatgaaagttgactgggtagacagacaatacaggagggggagctgataaatgcggaccttatctgtaaggagattgcttgtgaggcaccaagttttactgagctttgcagactgcttagtcttctctaaattatctttgtttatcacacaagtctacctcttgtgggtatcttcttaatctcttactgaggaaaatatttacctcttaagaagtttcataacaacatcttgttgctatgaacaacagggttatacctcataaataatattagctatatattatatataatatatataacatatatatagcatattatatataatacatatagcatatataatatatagctatatattttagctaatgcatattagctttcattagaaacttgtgaagccaaatattaagagcccctaggtactttgagacacttaagaattacatggcttttgcatgagctcaaaccagaatatagaaaaggctcacaaaaataaggaagaataaaccaaactttgggaccaaagaaatcttattgagaaccttctacaaattacacatgaatttgtaaaatcacagagacagacgctggtcctttttcatatgtggcagctgaaatgcagctagcacactcaaaaataatgcttcatcagtataaacaggacaaaatccttcttgtaccattcatctgtttacagcgttgacacagcagcatatcctgacagccgacactaatctcttatgcaatgattatggtgcaggtaaagtcatccataattgcagcttcagattacacagacatatctgtaaagccagaagtactgcaaaaatatggtctcaaaacagctatggcacatacttgtgttcctccttttagggaagaaaaacgacccaaaagtcttactcctgaaatcatcattagaaattcatttctttacttttaggaaatggaaaatcaaaagcattggttttgtggtgcacacctgtaatccgagctactcaggaaggtgaggcagaagaatcgcttgaacccaggaggtggaggctgcagtgagccaagatcatgccactgctctccagcttgggcaacagagggagactccataaaaaaaaaaaaaaaaaaaaaaaaagcattggttctgagatttgcatctgtaaatgtgtggttgtgctgacaggaagggagcactacaaatggccacaagggggaacgaaggctgaggagatacaaaggaaagaatcccaagtaagaaatacttagaatagtgaaaattaaatgaaaggattacaagtattagagaaagcgagaggagatacggggtatgccactcaggaaccagcctcaaaggggataagaacactgaaaagaggagaaacaacaaagaaaggtcgtaagttttaagcacaaggaagagacacttctgcaaaaaggacaaagaattccatactaacattttgcccttgtttagtaactcctcaattcttgattcattaatgaattctcatggcagtgtcaactaagtggggtttttttgtttgtttttaaataaaagcccatcatgatctttgcctgggagtggtgactatagctgaatttttgctgttgatgtccctggtatgaaagatagaagacttactgtattcatattcatgctaaaaccctccttctaacaacatgaagattgtataagaacactggatttttgtcaaagaggagagtaatttcattttccaaaagattatataatattccttgaaaaggtacactgtaaaacttaaatttttataatacatattaaataattgcacaaatacacacaaaaggccagaaaagtaaatggaacaatatacttcattaaaaacaatgtgtgtgaaaacctaaagataaacataaggattatgctgtcacattgtcttttctccaaaagtctcaaagccagttttactcacattaacccacttgataaaatattacatataacattccagtgaacatgttttttttgagtgatctggaaattacatttgaggttttctaatcagataacttttttttcctgaataaacatcttaaaatgtaatttcagctttaggcattttgttgaatgaatgtcaaatgaatctaaaacctcctacttgttagttcccagagtactagatgtgtttcctacagttatctattgctatcaactgaattttattacagtctgtctgtgaacaaaacaattttaaatgatggtcgtatattttaatcacctggaatttaaaaagaaagaaaaatatgtccggatactactctatctttggaaacccctccagggatttttctgtgtagtcagagctgaggagcaatgcataatattctactaaatgtcgttcaagattcacatgctctttcctctttagtaacaccagcaatgtttagagatggggctgacatacatgggcattcacacgtacacacaagatggtcccagctatctatctatcctttcagtcatcggtcatttaaataaattatgttccattttacttttacaaatgtgttgagaaataatttcatggcaatttttagaaaagattataaagtaacttgcctaacattacatagctcatggcttaactgtcacaagaatctttgttttgtatcctgttgtgtgatattatacaaagaaaattttatttggacacaaaagacttagattcatcaccaatccttgttgtttattagctgtgcgatcttggtatcatcacgaaaattctctaggtcttagcttatccatctataaaagtgtgatgttaattccaaactcatacaacggttgtgaagattgggttaatggcattaagtgctttttaagtaatactgagaaatgagagagacaagcaaatgagcagaacttcctccggttagaactaaaaattccaaacagaacttactctattactaaaactatctcaggaggaacttgactcactgaatgtagcgtaagatatattctgacacagaatctcataaatacagtcattgcggaggcacagtgtttactgaaccaaataaatacatgttacaaaaagctgaacaagtcatctttagggatctcttatgattatttagaaacaattttctcttaaaatatagacaactgtcatttgatacttttttttcctctactttctagctgagttagattggcccacaggaagatcatgtaacagttgatggaatacattttaactgactggcctgatttcttaattccacagtataaataacttaaatcaatccacacttcagtgtgcatccattatgacaataatataacaaatagattcaaataattgctttgggatgttggtcattctttagcagtcttattatgagacaatacaggagcatatttgtttcttgtgtcttggtagaaaattagtttacataaatttcactgtgtgacttagtgattaattgaacatgtaccttttataggaagtgcttaaagaaatttactctatttcacattaaaaaggaattaaactaaatctatgactccacatccttggagcttttaggttacgctgcattattttaaagactagtatattttaggtgaagagccaaattccttttgaacatgaagtgcacagtaggtacatggcttagttttggtgcctgggtttcccttagtaaatacaattttttattagtagtaaatgaaatggttttaagagatgagcaccattcttaaaagaagcatcccgcaactctggctatttctgctacaagtataaaagtcaccacacatccatttgtgaatggagtatgcatttcactttcctctattcttttgtattactaaaaagggaagcctatttttcaatatttgtcttgcatgagcccccatggtcataatttaccttgctttcagctcagtgattcttctttacatgttcaagggcaaactcttaaacataaatgccgtaaaagtgtgaatttataaaactgacaaaaacgtaaagcaaagtatactaaagaaagataaattgtacttcctctaaaagtacagatgacagagtaaaaggaaacaagtagaaatatcctacactgataacctggaatttggtttgaatgagttatctactgcatgcaaggggaagatatttgaataaatatttaattcaactgccttatatcaatatgtcaattgtcagtttaagaaatgattgattccggccaggcacggtgactcacgcctgtaatcccaacattttgggaggctgaggcggcggatcacttgaggttaggagttcaagaccagcccaacatagtgaaacccagtctctactaaaaatacaaaaattagccgggcgtggtggcgcgtgcctgtaatctcagctactggggaagctgaggcaggagaatcacttgaacccaggaggcagaggttgtggtgagccgagatcgtgccactgcactccagcctgggtgacagagcgagactccatctcaaagcaaaacaaaacaaaacagaaatgattgattccttaagaaaatttgaagtctatacatcaaataatgtactctctgtgcttttacatttatgttttttttttttttttgagacggagtcttggtctgtcgcccaggctggagtgcagtggcgcgatctcagctcattgcaagctccgcctgccgggttcatgccattctcctgcctcagcctcccaagtagctgggactacaggcgcccgccaccatgcggctaattttttgtattattagtagagatagggtttcaccgtgttagccaggatggtctcgatctcctgacctcgtgatccgcctccctcggcctcccaaagtgctgggattacaggcgtgagcctacatttttaatgcttttttacatatgaattgaattgaaaatgctaacctttaaaatgtgttcaatacacacatttaaatttatcctaaagttctcttacttcctaatagttatattttttcatgacctatttaccaggactttcataaatcatattatttacctgaagcaaatcagaatctatgtttacagctgactgctactctgaaactctggtttggcccatgtgtgtgatgactttaggttggtgtgagtgagtgaggaggagacagggaattttgttcatgcattctaaaattggtaagcaggacaggcgtggtggtttacacctgtaatcctagccaaggctgaggccagcagatcatctgaggtcaggagttcaagaccagcctgaccaacatggtgaaaccctgtctctactaaaaaaatacaaaaattagcagagtgtggtggtgggcgcctgtaatcccagctactagggaagctgaggcaggagaatcgcttgaacctgggaggtgaaggttgcagtgagctgagattgcgccactgcactccagcctggtcgacagagtgagaccctgtctaaaaaaaaaaaaaaaatggtaagcagacattcccaaggactgaaaacatggacaaacatttttaaacgggaacataaatgtgttccagataaatacacaaacctttagcaaatagaagatattttcttttaccatataactagggaatatacatcacacttgttagcttggaatatggtgctcaagatgttttgaattttaaatcctacttatatggccagaagaagtagtagtatcactataacaggtcaaaaacggaagctggattaagtcctattatcttgcaattgtttttaaacaacatttcacaaagcacacaaaaatgtcttaaaaataaagaggtaactattatagggttatcttttcctcatgattagaattttgttcttttggttttaaattaatgttattattcattgcatgacttaaaatattaattaaaatttcactatactgccagaaaaacctgttgtatagacttttaggggataaatctttatcctaaaccacaatctcactccagtgcctgaggcaaatgttctgtgctagatacatattttaaaatatgcaataatgtttatcatcctcgaacagattaatctctgctaccagatgggccctgcttttgattctataaaatgttcaccataaacagttatttcttacaacagtatctcatagtattgaagtatatcaaatttcagagaaagaaaacttgacctcagagtggctgtaacagtcaaatgatacatttaaaaactcctacacaggataaacatgtaaagcaaaactgtaacctttttatgtaaacaaaggcatattagcaaaacaatggctttgctttttggataacccagtggttcctttggtagtatccatgggggattggttccaggacccccctccaccaaggataccaaaactacagatgctcaaatccgtgatataaaatggcacagtatttgcatacggcctacacaaatctccccatatactttaaattatctccacatcacttataacatctaacacaatgtaaatacaatgtgaacagttgtcatttcgtatgttttcattatctctccaatcctaaaactttcaatctgcagttggttgaatccgcagatgtggaatccagggatatcgagggacaactgtatatacttgtcttctaatagaaaacacttttaaagagagatacaccaccaggccaaggcaagactaatggtgaagtggagagaaatctctcttttcctacctctcctggaaacagaggcagctgcaatgggtaagtgtcacaaatagaaaagccagagttttgaaaggccccagaacttttccatgagcagtggatttatttatttttcaaattttattttagaatcacagagtatatgtgctggtttgttatatgggtatattatgtgacactgagatttgcgttacgattcatcccatcatcaggtagtgagcacagtacccaacagatagttttccaatccttgcctcccacccccaatagtacccagagtctatagttgccatcttggtgtccatgtgtactcaatgtttagctcccatgtataagtgagaacacgtggtatttggttttctgtttccatgttagttcgcttaggataatgacctccaacttcatccatgttgctacaaaggccatgatttcgtttttgtgtgtgtgtgtggctgcatagtattccacggtgtatatgtaccacatttcctttatccagtccactgctggtgggcatcttggttgattccacgtctttgttattgtgaatagtgctgcaatgaatatatggatacatgtgtctttttgatagaatgacttatattcctttgggtatataccagtaatgggattgctgggccgaatggtagtccagctcttacttaagaaatctccaaactgctctccacggtgcttggactaatttacattcccaaccaagggcgtataagcacctcattttctctgggggtccctccaaaatatgttacttttgtttacttaacaaaagccattctgactggtatgacatggcatctcattgtgatatggcatctcattgtgatttgattgagcagtgaatttaattgcatctcaactcactatgaaattaataaaatacattcacataaaccaacactttagccttggcttttgtcttccaggtaaaggagtatacagtcatacaggtgtttctgaggatcccagagggtgacactatctaaggctgttgtaatgggccctttttggactacaactgccaccaggcacacacaggtatatgtaattaatgcatttaagtaggagaataaattgtacaaatcaagcccccattgcctagactggtcaagacagcagcataagcaaaatgggaaaagagccaggctggggacttagagatgaaggcaggcacagggaggcagaaaggaggacaactgatgttcccgaaaagggggccatgcccgccagccacagcttctgctaatcaggtgtgagttacagtgacacgaagaccctcagctcaatgttcctcttggctgggatgcttatccatcagaaacaagaattttaaaaaatgatcacagcaatgctgacaaggatgtaggaaaactgacaccaatattatgctacaagataggaaggtacgcgttttaaggaatcctgttgaactgtctcaaaagtcttaaaataccttagaactaataactacacatttaagaatctaggaactgccatcttcctctcttcctcccaccctccctcctccatacacgcacccagccacccacctacttgcacagtcacctcttgagcagaggagtgaccctatattcagaatccattcaacatctatccctaactactcaactttaaaaaataaggtaatgtttggaagtggcaccctcaagcaaatactatttaaaccaaacaaaaaaagggcctggagcagtggctcatgcctgtaatcccaacaatttgggaggcggaggtgggcagattgcttgagctcaggagttcgagaccagcctcgtcaacatggtgaaaccgtctctactaaaaatacaacaattagctgggtgtggtggcgtttgcctgtagtcccagctactccagaggctaaggcatgagaatcacttgaacccaggaggaggaggttgcagtgagccgagatcacgccatcacactcccaacatgggtgagagagtgaaaccctgtctcaaaaaataaaataagataaaatataataaactaaaattaaaattaaataaattttaaaacaaaataaaaaaggagtcaaggaaagttaaggcagatttagtcatgattcccatggaatgatctcacaatttcaagtgttggaacaccagaagcagctttctaaagacagtctttatgtttgaaagattacatatatagcaaccatttcaatttcatgcaaataagcacttcagattgttttgagagaacatcccaggggcaacatcactgatttaaatagcactgtatctacagcaaactggacaagaatcaagatgacgtgttctagaaaactttgttagatgacttaaaaaggggcctggtgaggacacagaaaatgatgttgaaattgcttgtaaagatactgaatgaaataatgacataaaatttgagagtctagggaaacttcatatgttaaaatttatatatttttgtataaaatgtgacggaatttgttttttaactaatacattcaaatattaacactcttaaggtgaaattatctacacatttatacattctagttggttacaaaatttccttcctggggaaatagggctaacttactgcagggacttacatttagacacagatggcaattttaaattttgagaaagatgtctatatggatgcgtaactttgtcttattttggggagtaaaaattagaaaccaaaacatggacataaaagcaatcaagtttgaaaccaagattttaaccttaactattcactgcaaccatttatgaaacattttaaaggtgcaaagaacagagacctatggcagtaggtatggtgtagacatcaacagtttacaaagcattatatgtaattctaataatcagacaagtttgagaaacaatattcaatggcagggaaactttttgtataatgttaagtgaaaaaatgttagtatacaaaactatacaaaaagtatgagcttaattttgtccccccaaagcattctcatttatacatgaaaataatacatggaaaaaaatgttctggaatgttaacaatagtttttccattaagtgaatttgtgggtgaactacattttcttttttatcttttttcctatattttctacagcaaatctttgctacttttaaaattttaaaagtcatatttttagaaagaaaagtattttgagaaagaaatctaaaaggggagcagaggcttttaaaatctggttttcatatttctagatcctagtgaacaataatgtcattagaagaaaatattctatactgttaaaagctcaatttgctaagtgtgtcactagtataagttttagactggtggcatgatttttccataaaaattaacacatccacttataatttgaaattaactaaggaaaacagctaaatataactgataactgaaggtatgtgattctagtttccccagtggattaaaacaatggtgttccctgggaatcccaaactgctgcattaccgggtgatttactgggcgaagaatttcatgttctagaaactaccatcaacaattacctatcagcatctgggtattacaaggccttttctgtttttgatgaaaagctttccatcagtaactatttagtgatcattactatataatcaacacaacattgtgataaatctgaggatgctacaaaaggatttttaacccttgctctggtaacagcattttcccccctagagatttaatgagatttccatcactttttaaaagtgaactacatttggaaaacatgaaaaggaaaagtaatggggaaagtttcaaccctatattctataaaaatggagagcattaagaactaatttgaggaaaacagaattgtgctctttaaatcagtgtcttcagaatgcataaactgaaaaagtaaatgttcaaataagtgttataaagactgtgaaatcaattttaactgatgattttaaaacgcaggaaaaaaagcaacatttaccattaatatttactacaacattatctggcagatggtgtacgggacaaacatttttgctctcattaggtggtggggtaaaacccagaaaactgggttcacttcgctggagtatgggaggagcctctctgtcattaggtcttttctggggcaagtgacagcaactccctcatctacagaaactggtgccaatgcacttcagtcttcagcagctttccaggttcacaaaagtctgtggggtagggagagcttctaaggaccacatgcaaaacagggagcaggggcaggcaagagctttctcttccggtaaagttttcctctctagttttacaagtgaagaaattcggtctcacggaggttgaagacattgcccatggccccagtggaacatagacctgtaatctaaacctacgggtaattcctaagactgaatccacctccccatgctgcctgcatcagccctggagaggaagagaaagacctcccgtccttattggtgaaatttcctcatggaattcatgtgcaattagtacgtggaaataccaactgaagagaatataaaataatgggcactgctaggatagttgtaagctacaacccacttccccaatataccttgcatataataaatttaatggcatgatgcagatgtcagttaccaacatcataatgtctatttcttatttagttcccgtttgttctcaagtcagcctttagaaaaataaggacaacaaaaatccttcctcatttaggaatagaatcctgcattttgtgcagtggtcatgctgtatgggatatgtgtttgaaagaaatgagaaaagacggtaggataaaatggaaaaaaaaaaatccgaaaccaaaaacctcattagatttgaaagcgagtacaattagcattgtaagcagaaaaatcagctcaccacaaatgtaatttcttttcttcctttcctttcaagctaaagactcataactttttttaaaaaaagttttatttttgaccaatgatgagtgctctttgataaaaccaatgtaataaagcggaacttttgcaaataggacaataagtgagaagaaatgcagtgtggttttgtgaaaaggatacatgcctgagttccggtctgggttgcgttttatatgatcagttcactcattgtctctcttcagtttctgattgaagatgatgttgatcatgcttttgcacagttcaggtgtctgttatctcctccagctgtaccagattccacctgttctaaattagatgccactcttctgtgcttccaaagcactctgaactttgtgcttctttctcttacgaggcggccatgggcccaccaaagatatcatttttatcttgttcttttgtagacaagcacctatcacagtccccagtacaaagtaagcacttaattaaagctcattagtaaagctccagttgctccccaaaggccttactgggtctcagattgaatatatctacgggccacatgcagtggctcacgcttgtaatcacagcactttaggaggccgagaccgaagggttgctcgagctcaggagtttgagaccagcctgggcaacacagagagaccttgtctctactaaaaataaaaaataaaaataaataagctgggtgtggtggtgcacacctgtagtcttagccatgccaaagactgaggaagaaggatcacttgagcccagaaaatcgaggctgcactgagctatgattgcatcactgcattccagcctgggcgacagagtgaaaaaaaatctatgaattaattaccccgtgactaaaacttaaacggtaaatatattaacttattataacatataaaaatgaaagttgaaagtttccagtgcctcattcttttgttaaagaatttaaatttatcaattgatatttaattcctcccactacagaactttaagtgactagtttccatgtattacaagatgatttttacaagaagagatgaaagacacacttccaaggggctaaaaatcaaatgtatgagtcatattttgtatttttgctaatttgaaatacattttttataactagaaaatttataattagcatctctcaatatgtcacagtaataggaagttaaaaaataacactctttctggttccaaaacttagtcttcatgtctatcaagtttttcaaagttagttaggattctgcatttttttctgtcaatcggggtgtaatacatggcatgaaggttataaatcctgtaactagatacaatgataaatgcatgtaccccattcttgttaattttccattccacaataaaaaacccctgctaactctgatcctttcagtgtggggattacctgtaccagcaacccacaaactctgctgctgcttcctgcgcagtgaactctacaactgcctttctcctccctttggcttatcttgctctgctccttcatgttaattccattcttctagaacttctgcattggcattcttatttggcattcttatttacactaaaggagtagttattaatggcaggtaatgtgtcccccaggggacactgagcaacatctgaagacatttttgattgaagcagtgacaagacagttcccatgacaaagacaaaagaccaagagtgtcgaagtttaaagaaaccctggattaagctatcatctttttcctactttttcccctaacatcttatatattacttttttttaatttgtggaattattccgttttcctcatttttccttctctaactcttccatatgtgttaatcatgtaaatatatctacagagtccaaacatatatacatgcacctccgtgggtatgtgaatacggcttaggtactggtatgaatgctgatgggcatgtgtgtattcttgtgacatcttagcatgtagtgcacttaaaagtcatgcaaggagtgtgtgtgacagaatatgtagaaaaattaacttgaagtgtttattacctatatatacaaatgtgtgtgtctacgtgttcctagcccttcatattataagtattaattgaatagttttcatagatttgcttaagtgtacaaacagaagagtgcagatatagttgggttttttttttttttttgaaaaatcaaagggtattgaggttaagttaaaaaccttaacacataaatgcagttgtgatctctaaattcactaagcatctgtctttccagtaaggattccagacatcagcccatgtgatgctactgttagctaaatctaggccccaaacttgaattagttttacaacatgtaaaggggaaaagacatgtctaaaaattataaacctgctgcacatacattacagtgtattgtttattcctcacaacatctcaatataaaaaactatcatgaatcacattttacagataggaaacagacgtggagaggttaagaaatgtgccagtggttctaaggcattaagtgacaatgtcaagatacaatctttagtgatctctggcaataaaatccatggcctcaactattaatgcaatactaactcccacatctgaatctttaatgtatgcccacagcagatcaggaaagactgaaatcactgtaatcaattctataaaacatttgtctcttattttgtgcaattttaagacgactatgtttcgtgaagaaaaaagagtcaaaaggttaagtaaaaactttcacagatttcaacaacatatcttagcagaattattttttcctttattggttttccttataaaatctctaagaaaacaacaactgtacgttattcaattatttattactgaataaataagaaaaagaaaagagtcaggcacattaatcacttctttgatccaaacagaattctggttcccatgagataaagttactctgtgtttttggttttaaataattcctgtgataaaatcccaaattaattattaagtaaattagcaaactcacattatatgattcattttcttcttagcatcagaactttcagtcacagttaagatagccaacattcaattatctactcatagacaggatcacagtacaagtaatcccaagtgacagataatccaaaaaggcatttatgttgggtttaaaattcattatatgattccagcagatttaccaccataattatatttattagactcatattaaaattcatttgtatttcttaaacacatgccaactgagggaggatctcagaaacatgctggatcaagaaaggaagctgatttgctattagcaattttcctgtgaataactgacaagaagtcatggggatagtaaaactaaatttcatatttattaagagtcttatgtgataaattagagattatattatagcagtattgtagaggtgttacggcatgggctgtggattccaacagacaggtttgtgtactggttctgctcttgttccgtgaccataagcaaatttcttatccttctaaacttcagttatttacttacaacagtgctaatattagcactccctacatattaagggagttctaaaaatccaattattaaatgcacactgcttgacacaaaatagttaaaattagttgtggttgttattttttgtttcagttattattttatctattttactgtagtgctaaaactagaatatccgatagtttgtattattcctgcctcccataaaatgatgccatctttgattattcaataaattacatagtatactgtagggtcaaatattagaatatgttcatctggtgcagacaggcaaatactagagatgcacagttttctagttttaaacttctggggccatacatattcaggaattcaaacttttggtaggttttttagaaggtaatagcaccccgccaggagggcttggggtggaactggatactccaacacattaatatctctgcagtaaaacacatgaacatttacactgagtgttataaagactataaatacttgtatgtcagtttagtacagtttttaattctaaataagtattttttcagaatttttaaggattttagattatagataagaagttgtggaaatggattaaatagaatgatacaactaaccttgattctacagttttccattaataatatactacatgtcataacattatagggtaagataactggggagttaaaaattcctcttggtttacataaaatatccctgaataatttgtagtaaatggaattctaaatagcaattcaagtttaagtaattactccctaatttttaaaagggtatggcagatatcctgatttgtataaagtgacatacagatagcattacccattttatacttggtttcaattaggaattaatttctctcatagttgtactttaccagtgagtgggattaaattattagatttaaggatttaacaaactattaaattcctcagtgctgatcagtagatgaagcagaacataagcaatatgattggaaatggagctgagttctctagggaaaaaacactggtctatatctattatcttcccacagatacacaacaattatatcagattgtaaatagtccccagtatgaggtagaaaaaaatctgatgcatatttataaaagactgaaggaaagcgtttatatcattcactgatcagagtaaggaaaatattattgactataaatccaaaatattcaatccaaaagattttaaattacaaaggagttcaaaagttagtctaactgcctgggtaaaatgtgctgaaagttctgttcaacagaaacatcaatcaacacaaaattcatcattcaggaagtgctaaattttcattaatcactgacatgagaagatcacagtagaatgaaggaatatatatgcgataaaagtggtacataaaagaccataaaaataagaattttgaagaggacttaatgttgtcaagtctgaataaggttagagtaatagttttcaatccaatataaaattaaggagtaaataacaagtaaacaggtttaaaagcttcaattgtccaagtacaggtataaggaagtctgacagaaaatatatgatgaaagacatatacagttatataataaaaacaacaaataaaaaatcaaggccccttccactaaacaaaaaaggagtctataataagtcaaatgttaaggtcaacttgattgcctaaattccagacataactttgtgctttctgttaggataaaaagaaataacatgagtagctctataatcacattatctcagtagtgagctgtatacatttcttaccattgtttcaaaaaccacattaaactgcaaatctttttcatgaggagctttatgaaagggacccaaagtgatgacatgcaaaataatctggacaatttatagcacgtaaaatgtggaaaaagaaaagcccaaatttcatttcagccaaggcagagtagtttgtattaaatcaactctcatattagaaacagtaacaaaactagattaaatttgtaaaagtgcattttaagacactggagagcaactaaaacaatcagaactttaaggtccaagatccaagaaggaaagaaacacaagaaaaggaactatcaatgtatatcattttttccttgaggcataatcacaacgtctgctattcacttaaattacaaaatatttcagaatactatcccaaattacttaaaactaaaagtagaggaatagataagaacaaactaaaaggagagaaatagataagaaaaataagaacaaattaaaaatttttagagttatccaacatgtactttaaaataacaatcataaaatgcttaacagataagaaaattgtactccaaaactgcagtctacaaaaccaaacaaaaacctagtcaaatatagattccaaaagcgaaaaatacagtatttgaattgaaaacctgacacttgtgtttgacagcagaaggacatagaaatgattaatgaactgaaaaatgaatgagcaaaaatgagaacgtagttcaagtgggagtagtaagatactttaaaaagcataaaacaggcccaacacagtggctcacgcctataatcccaaaactttgggaggcggaggtgggtggatcccttgaggccaggagtttgagaccagcctggccaacagggcgaaactccatcactactaaaaatacaaaaattagccgggaatggtggtgggcgcctgtaatccagctactcgggaggctgaggtgtgagaatctcttgaacctggaaggcagaggttgcagtgagctgagatcacgccactgcactccagcctgggcgacagagcaagactgcctcaaaaaacaaaagaaaacaaaacaaaaacacacaagacacacaggaaaggtattacatgtgtgtaattggaggcccagaggagtggagagaaagaatagggaaacagggcacagcaacattgaaaatactggccagatattttctgaaagacattttgctgtacaattcaagaatctgtaaatcccaagcaatataaattcaaaagaaactactcaaaagtagtcagtgaaaagatgacctcccaaagagtaactatttgaagagttacttctcaacaaaatgacagaaccagaagacaacaggataggtttacattctgaaataaaaaaaaataaaacaattgacaactttgatacttttctatcaaaaatgaagacaaaatacaaacattttaaataaaaacagagcattcatggctaacagaccatgtaaaaagaagtactaaaaaatttcttcaggcccaaggaaaatcatccctaatatagaaatatggaaatacaagaaagaaaaaagagcaaaggaaaaggtaaatatgtacataaatctaactgagtaatgaagacatcttgctaggctaataatatactgtcttaacaataattatattttgaggtttaaaatgtggggcaaaaaggggggggggaatttatagagttaaaatgtcccaagatctctgcattgtctagaaattaagtaaaaggattaaactatggtgagcatgaaaatgccacaggggcaatgtaatttataggataaaccactgaaaataatatttacactaaagagaaggtagggaaaggaaattttaaaatatcaggaaaaagggaataaaaagcatacagtgtgatggtataatgtacagtactacattctgcaattaagtagtctagtttttatggttttaaaattatagcttcgatttttaagaaaaacttaaatgtagtaactcttaaatataagaaaataaaagttgaaagtaaatgaatgaaaaaaacactaggcaaatacaaagcaaaagaaggttggtacagttatagtcatactagggaaaaaagatggtaagctagaataattactagaaactaaaaaggacagtttactgacaaaagaaccactccaacaggaatatatacatacatacatacatatatacgtgtgtgtgtatatatatatatatacacacatacatatgacatatatatgtcaatttataaaaatagtcttaaaaagcaaaggcataaagaactaaaatgagtaatagacaagcctacaaatatagtgtgagattttagcataactcactcagtaacagatagacaaagagaaaaagttagcagggctatagaagacagggggaaaaaaaaattaacaaacttatcttacttatttagaacaacgtacctgatatctatccaatacacagtgtttttcaagtacttatgaactatttaccacaatgcgaccccacagtgggctacaaagcaagtcttaacaaatctaaagggatacaatcattcagcacgccctctagtaacatggaatttcaccatgttggtcaggctggtcttgaattcctgacctcaggcgatccaaccctgtctctactaaaaatagaaaaattagtcgggcatggtggcgggtgcctgtaatcccagctacttgagaggttgaggcaggagaatcgcttgaacctgggaggcagaggttgcagtgagccaagattgtgctattgcactccagcctgggcaacaaacaagagcgaaactccttctcaaaaaaaaaaagaaaaaaaaaatgctgggtgtagtggctcatgcctgtaatcccagcactttgggaggcctgaggtcgggagttcaagaccagcctgaccaacatggataaaccccgtctctactaaaaatataaaattagccgggcatggtggcatgtgcctgtaatcctagctactcgggaggctgaggcaggagaatcacttgaacccaggaggtgcaggttgcggtgagccgagatggtactccagcctgggcaacaagagcaaaactccatctcaaaagaaaaaaggcgggggcggtggggggggggggtgatttcagtacaaagcctacagacattataaaaatattaagatttttgttcgtttgttttttgtttttgagacagagtctcactgtcacccccaggctggagtccagtggcacaatctcagctcaccacaacctccgcctcccgggttcaagtgattcttctgcctcagcctcccgagtagctgggactacaggtgcacaacaacatgcccagctaatttttgtatttttagtagagatggggtttcaccatattggccaggctggtctctcgaactcctgacctcatgatttgcccaccttggcctcccaaagtgctgggattacaggcgtgagccactacgcctggcctaaaaacaataagattgttataaaaaggtttattccgataaatttttaaattctaaaaaacagaactgtttaataagtttgcttcaagaattgtttcaaacacttatcaaataaatcacccaaatctgacacaaactcttccacggaacaaaaaaagaagaaacacatagtgaatggttttatgaagctggcatacttgttatcaaaacctgcctaaatttacaaattggcaaaacaaatccatattttttaaagtcatattttttaaaggataatcattactcttgaaaatgggtagtgactaggatgagacatcaatgggcatataaattattatttctttatctgattgttagttacatatatctgtgtttactttgtgaaaaatttgcaaactgtacttataatttgtacatctctccatgtgttatacaattttaaaaaaacttacagaaacaaaaaagtccttaatttagacctttctgcaggtaaactttaattcattaaacattatgtatgtattttgtgaagaataaagctattatatagatgcaccattattcagagtaagttttctcttttgttcatcaaaaacaactataagaaaaagagaaatatcttgctaaaatcatgccaaattatactgatggtactttttcaatgtccacaaactaaaaaatacatttgttgtgatttcttctcaggaaacacatgtaagtttatatgattgttagtattattttcctacctacctgaactattgcatttaataatacattgtaaattccaacaagtatagcaatatatatttttcagggtttaattttacattttcaaaattgtagacatatctggcccagtccccttatctttgatttctcctagattttctataattattctgcaagtacatagataaattatatctatatccatatctataacagttatatgctgagtatatataatatactcagcatataacatagttcctggtaacttgtaattactctttaatagttgttaaatgaagaaatggactcaatgacaaagtgataaatcagatggtctctgatcaatttctcttctattgaaggctttaatttcctcttaagtaaatttgtttccctttctaaatgttaagaggttgctttctcctttgacaaaacaagtactgaacagttctgtggccctggctaacttgtccttgtagttcaaaatcagaaggctctgagtagagccacgctgattccttctcgacatggttttcatgtctagcttgtttatacgatgtacgattacccagttagaacattctttgaatctctcatttatgttgaactaaaagaacttttctgccatttaaggcattgtaagtcagctttcctaaggttcacctctccattctatatctaacattgcttttcttacttttacaagctccaatataaattctcattttccccaggttgccatcactgtgacgtcatcaagcagttcttccttcttattcagaacataatcagagcacagcgtcagttttccctgattgcttcatttctcatttggcaaacacaacaaaaccaaacctgtcagcaagttgaagatttaccagatgcccatatactatgctgcaataacattttacttatatgatttgggcaatgtacacagtatctaactgattttaacagtaacatttaaaaatacatgccaacacaactttggttggtttctatggttagcacttttcaaacatttccttctttgaagtccatgccttggtatttattctgacatagagataaaaaaatcttaaaagtacttaaaggtaactgccagacggatgtgcatgtgtgtgtgtttacatggctgttttaaatacattcttaaagcaatacttgtgtcctcacgcctagacagtcattcagctttatgatatccataatgctagaacatttgccttcagagacctgatgaggctgaagtcaagagaaacggaaggttaaagtggaaattggggtggagggataatcactgagaacaaactcaaattagctacaataaagatttccctctaagccttgtcatctcttttgtctttcaaatatatttctttcttctctggaccagccaggggccttctactctccagatttctttttaatcccttgttgacttccttggactttttttctggtcaccagatagtttctttggggaaactgggatcagtggggggcaggaatcaaatttaacatttttacttatgcaacatataaataagtacaaagtatgagatatgactgattagttgttgcctgtcatccattgccactgctttctaatcatctccctgaagcatcaagctcctcaacattaaggttctgtattctgccagtgagatgttctcatttaagagtcagaaggaggaaatgagagggaggtcatcttgctggtttggttgccagcaacaacattcaacgttgcagagtcgagttactagtctgcgggggaggcagttgtgtcagctgtagtactcgcaacagcagcagcagcttctctgtctctgcttcacagctatggtggcgtgtcctgaaatcaatgatggggaggcagacctgacttccatccctccttctcttcaatgaataagcgagcattcgctatactaaattcctgttctcctgaaatacttagagtggttcgtgtttcctgtaccatacactaactgacaattgttaagagactggaaaagagaatatgaaagagaaaaaggaatgtaaactgagcggggagaaaatgcaggataagtcatcaccaggaatgcacattctaagttcctgaacacagtacaaacggagtccagtcccactccacttgcctccaaagtgtacatagtttccccatgttcctgacacctctgggcccttcacacattcgctatctctgaacacaattttctcccaaccacttttccttcacacccaactatttcctaattcctaacacatctttaggacacagttcagacattccctgtcttccatgacgcatcctgatgctcactctaggctggttagctttcctccagaatcccataatacattttatccatccaaatttttccacttcccatgctgtattaaagttatctgcctgcagatatctctcttataagacggcgagctccttgtagtttcgaatgacattcaataaatcttgccaaatgaataagaaaataattctatattttttattggtccacttgcctgaaaagactagaatgttgtttttgtggagttcgtggaagtgatcatattaaggcttgaatcaaagcgggatttcctagagaaacttctaattctccttgtaagctatttcctggaggatggaagacggccacgtgcttgggtcctgtgcctcatataaaagggaagggattctgacacatcctgttcatggtcaatgatttgatttttagtttggatttttctgtgtgtctggccatttgcactgcaaatatatttcagaatttaatctacacacctacatgtcagcaccacccactttcaccctgggtaagctgatttagggaccaaaattcttcctttagtttttcaaatccctttcaatatgaatatatatttttaaaaggaatgaaaaaaatcaaaactattagtttcattcagtattttgaatgctcaggattttaaagatggttagacagtatatggattactaaatctcctcagtgccgtatctgagggcagaatgtaaggtgggtgacccctcacatgagaactggcaatgggaagacagtgagatagaaacccagcaggaaactgtgaccactgctcaacacagaacagggaacttgggtaagactccactaatgagaaggaaggagagtaaatctgagagcacctaggaagccactggtcatcatgaatcacaagctcttgatgagtgcagaatccagttctttggtgccagaatctattctaactgatcggtccttgctccatctgctcttaaaattttttaatacctcacttagctaagacaggctcatacgtgttgtatgttagtggtaagcaatggaaggctaaagtactgtctgacatattttaagaatattctcaaaaagagccaagcttttaggagtggaagtctttaggctcagctgtgcaaaccagaagtatcagacacagaagacatgagtgaacctttgtgagagcagagaccttattttgaccactgctatcttccaaacacctggaatatttgtggtataaatgagtgaaatgaggctggtgctgttaggtgcctctctttctcctatttgctcatctttctcggttacatcatttggttagtgcattgaccatttcaccttccacatttttatgggtttaaagcctaaagaaagaatctttattttatatatatatataaacaacataatcgatgatctatttgaccagttttgctctcccctctgctcccattaaatgaggacttcaataagaattcagagaaatcacttatagtaaactcaacctttatttttaataaacaaaagggtgaataaccataaacatgaaatgaaccatgaatatcatctgccagacaactgaaaagagacaaagctttcttaaatatggcttgagatttcaatcatttcatcactagactgattttaaagagacggtaattctcaaaatctggttcatcaattttttgtttagttttggtatggttgttgtgtctttactgtttagaaaccacagcttaaaagcaacttagatagtaatgctctaaatgaccaaaactacattttataatcaaagcactcagaaatgagttattaaaacccaattttattattctttctctgtgtttatattggtttttgtggattttttctgaaaactatataaacctttgctcagccttaactctttagtgaactattttatttaaaaaataacaacacatgaacttgactgtgtttaacttctgttccaggtaaaaaagacatgctataaaaagatttaatactgttctcagggaaaagaaaatgtcaagctacaaaatatctgtaatatgtattaatatgttttaaaatatctaaaaataattaatgctgataatgtattcaaaagccctataatagtgtttaaattaagaaggccctcagaatttacaatttaaatagtaaacatatggcactactcaaaaaaaaacattgaagcaaataactcattaaaaatgcaaatgaatacaagtgaacttgcttaaaaaaagcaagtaagagaaccaaaggctataatggcaatggaaaaggcaaggtcgaggactgttcacaggggagaattctgatgaggtcaaatgcagccttcggagctgtggactacttattaaggaagtagcagttctgaatttttattacagagctttgctcatactgtgatgatttcagataaggtatttatagattgtctgaatatttgaccttggaactattttatggacactagatatattgctttttatggagaaaatagacagttctacataggtaaatcatttgcattatcagaagagaaagctgggctgaggtagggaaggtggtggtgacacttcccctgtgaaacatttcatgcctgttcaatacgtttaagcaattacgcactaccataaattagaaaagattataaatcaattagtgactcttactagcagccatagacccatgtaaagtaaatcacatgatgccctttttacaataagttcagtcttgataaactcagttattcaggaaaatgtcactgcagtgatgtctgtctattctaaattggaatcaatccaataattgacttctgttttcttcagcaaagggcacttaacactaacgtgtggtacatagtcatataggcctgaagatcacacaagtacatcctattataccaccctccaccttggcagatggcttaccttgagtgaaaccattaactactcccaattcaagtgactgaaactaagaaacatgggccaactgatcatcaccttgaaaataatattttcttcagaactgacactttccttgatactgaaattttcacttacaggttttaagtaaatctcactaatatgttttttggattagatattaaccaaagagaaattttaagaattatagctctttgcccttacaaagtttcaaagatctacagtcattactaaagaccatattttaaataggtattttaattatgagatataaaaatataatcaggaataatttgagtatggtttacaattatgtttcaacactggtcatcttagattttcatatatcatgtgcaaaagaatacttaagtgaaaagaacgtagtagttattgccaaattaggaagatcactcgccaatcaatactaaaaaaaaaagaacttgaacagatttactttgtaatatttgaaatatacaaaagaatacaattaatataagttaggaagcataataacatgaactcccatggtgagctttttgtcttttctaatatgtacatttattctcttttaaggttacaaagaccagtttgacagcttcctgcaaatttattttcattacgatatagttctaatatttttgaaaatttccaccatgattttttgactgactcatgggtaacttagaaaaatgtcaaatctcaaaatgtatttttaaattttactgtcttctaattaagtgtagtggttagaaaacatggtttttgtgacagaaattttcagaaatttgatgaagcttgctttgttgtacattgtgtgatacatttttgcaattactacatgtccttgaaagaatgcctattttctaaactgttagatacaggaatctatatatgtttattccatttaccctattaaatgtgttgtataaatcattaatctttaccagcttttcctgcttgacaaaaataattgataaaggtgtattaaaatctacctctgtagtagatgactttttaacgttttacatttgatgaattgtgctttatatattttcatgctatttttaaaaaatgcttacaggtttagtatttttatactgtcctgataaactagtaaaactatcttcacccaattgttttctgtgctaaaatctgaatgatctgaaacaaaatggctgtatttccagggcaaatttgtcattattcctttattttcaacctttgttttcatgtttaggtgtgtaaaccacatatgactatacttttaaattcaaactcagagtctctgtcttttggcttttggaattagattcttgtattaattttctattgctacatgataaattactgcaaacatactgacttaaaacaagacaatgtattattctcagtttttgtgagtcaggaatccagcacattttagctgggtgctatactcagctaaaataaaaaaaaaaaaaaaaggttttagcttgctgagtcctaatctggaggttcaactagcaaagactcaccttcacactaccacagattattggctgaattcagttccttgtggctgtaggacagatgcctttcggcttttagctgggactgttttcagcttttagtggctactctcaggtccttgcaatgtggcaatctctcagacctccctttctaggaccagcttgagaaaactctcttcccttaaaagactcctgtgataagatcaggtccattgggacaatctccctttcttaaagacaattgtgccacaggatacaacctaatcacagaagtaaaatccatcaaattcacaattccagggattatgcaaaacatgtactctaggctgaagcagacaggaactcttgggggccagccagaattgtgcattccacattcatttacgtggcttataattagtgatacttggctttatttttaccttattccttttcttattttttatgtttctatttgtcctttttgtttaattttttcaattctgatttctaaaaaatgacacagaaatacttttctgtggctgggcgcggtggcttatgcctgcaatcccagcactttgggaggcagaagtgggcagatcatctggggtcaggagtttgagaccagcctggccaacatggggaaaccctgtctccactaaaaatacaaaaattagccaggcatggtggcacacgcctgtaatcccagctactcgggaggctgaggcaggagaatcacttgaatccgggaggcaaacgttgcagtgagcagagaccgtgccactgcactctagcctgggtgagagtgagactccgtctcaaaaaaaaaaaaaagaaaagaaaagaaatacttttttgtttgcttgctgtcttacacattctattcccattcaatttctttgggaaattatacattgaacctctgttctttcagcagttattctcaattttttttaaacaagtataattaacaaactatataaggacattagaaactaactcccaatgtcctctccaaatttaaatgttattacagtctaatacttcagctctatcattgtataaaaatcctatcaatcagaccgtattaatagtattttaagaagaaaatgtgcacgcttttataaaatgcctttttttagtcattattccatattacagctcagatcatcattttgggttctatttttaactcagcaataataagttggaatcttttagctgaatgctttagaatttccttttagtctctcagtttttgttcaaaactgtccttatttttgtcaatattttgaaggtatttcacagaattatagtgagtgaccacacagctttatgtggacattgtctatcagcattttgaaaatattatcccattgtcttctagctgccactgttgatattgacaggttggctgtcagtctactggtgttttctttgtaaactgatgtcaccttcttgctagtacctactcctccatactgctggaagtagcatttctatgaaaaataagtgatcaaatgattgtcattaactattggctttgtaaaagttgttttcttcatttctatgaagatcttattattattgatatggacaggaggcaaggaaatattgggtagaacagggtggttccccagcaaaggcctcagcctcaagcctggaaactggcagctctaaagagaacaggtattccctgttttcacgcccaaatgttgccttttccaagactactctggcctgccacgactctatcctgtgctcatataaacccctgacccccacagccaccccgtcaccaaacagatgtttatatagttaatacatccttatcatatataatctagttgctacttttcttagtattttagctgtcataaaggacttcatgataaaatagcagtaactccattggcatcttccctggatgtctctcatgaatcttagactcttaatgggtcataagagttacacagactttatacctggttttggaaaagcatgaactcaaagtaaatttaattaaattatctattccacaacctctcttcacaacagaaaactatattctctatggataatcacataaaattatacaaaggctaataaaaagggaaaaacctttttccccttcttacatgggccaaaaagacataaaatctaaccttaaaaattcaatgtttcttacataaaactagactttctcatttgaatgtggcatgaagtggttccaggtaggcaaaactaaaaggaaataagataaaaatgcaaaggaagtacaaactttctattacttattttaaactatttttgacgtgggaatttgttctgcgttgtgcactgctcagcatgcctctgccttggctccggttatcttctcatggtcctcatctattttgcagtctaacttctctagtgacataagatataatttcctaaaaaagagatttttctaacaagaaaaggcagggtaaagggcaagagagtgccatgggaggaggtgctactgagattgggtgttcatagaaggcctgcctgataaagtgagacgtgatctgaaacctgaataaagtaaggatggtgtccttgtggacagtgctccagagacaggagctgggagagctgtgagtaggcaggggcacccaaggaatccctgggaggccaggggaggtgtggcaggaaacatgggaggagctaagatcagaaatgggggtgaggagcaaggctatggaggccctgtgaggagatgacaggattttgaattttatcttgagaaggaaagtttttgaatagagggctgatatgatctgatttatgttttaaaaggatcattttggctgtgatggggataacagactggagaaaaacaagaactttccacagcccacaagaaaaattcaaactactgagactatcaatgaagacactttaaaataaaggacagacctagagactcttcaagtttactgatgttcagaataacctgctgttcagtgagtattacactgtctttcacatggttttatttctgcttatgctatttctgaagcccaaagtgccggttcttcttttcacagactggcaaaatcctactcattccaaatgggccagctcaaatgtcactgtttggtgaagccttcctttatgaccctgggatagttgaacttttttctgcttctcttccaccccaacgttatgaatgtgacataaaatttgagtcacaaaaagaaaacataacaaaaggtaagtaggtaattatacactgtagacaactgctttatataactctaagaaaagttagactctccataataggaaacatagataagatatcaaaacacacagtaaaaccacaataattaaaacgcagaacaaaaatgtcctgaagacaaggggaggtatataaacacacataattctatctacatcatgccttgcagatcaatcctatgaagatatcaacaaaaacaatgacttaattactcaaagcagtagagggccttggtgccaacacaatctctacaacagaagttcacaaactggggcctgcaggccaaatcccaccagatggtgtttataaatagtggacatggaacaccacgccctctcatttgcatatccccctccagctgcttttgcactacctactcagcagagcaagagtctttgtgatgagccatatggttcacacagcctaaataaaatacttactcttcataaaacaagtttgctgacccttgctctgccccactcctccacaagctccttaactacttgaggttctcaaataagtcctgatccttcagtcgtctcagtgactgctcatgctagccgttctgcctggagcatggttctctacctcctctgcctggataatcccactgctcctttgagactcagctcaagccacctctaataagatgctcctcactctccaccgtgcacaaagacccctcctctctggtccacacctgctcatgaatacttggaaactgacactcagcccacctgattttaactatttatatacttgccaccccacttagatatccctgaaacaggaaatgttttctggacttcacttttcctctccaaatgaacaaacaccaaactgttcagcttcttagtttagcatcagatccaggctaacgaagagttaaatgagttagaagggagttcaattagtttattgcctcataggacacatcagcatggtaaagtgatcacaggccattaagcgtaggggtgaaaactgtataaggaattattcctcttaaacatctatgtagagtcttgggtcctgatgaggaattgcctccaacctgtgacggaggttcctctgctacttcctgctgcttccagatgcctctagccatgactcaaccattcgcttcctaatttgttgcttccaaaccactctaggagctggaaagcaaaacaaacatgtggtaaaactggtacctaaaactagaataaataggcttttaaggacctatgggatttttctttcacaggtgcatgaacagggctggtctcccaaagacaatttttctaaatcccagattcttggctatgttctaaatagatttgttttttaaataaataacctagcagtataactaaccaaactgttattaaatggaaagttatactttgacctgcttaaagaaaaaaactatcaaaacttttgcttttaaaaagactagacaatgttattagcaaacagaagttattattgcattagaaaataaaacatacacctacttttaagtaagtctgatatctgaaagtgttaacgtctaaacaaattagaatttttaaatgcacctattcacaatcattaatgcccaaacatgctctctagagataacaaaagtcaaatttcaggagtctttgccaagtgaaaattaaaaagaaattaagcttgttttggaaatgaaaggtaaattaggggaaacttactccatttttataagtcatatatatataaaccattatttataaaaacatagatttcacttttatttctgtatttttgcattctgctagaatcattaaagcctatttttctgtaaaagataaaaatatttgaagtaacattttttcttttaaatttctgagaagcttaaagcaataaaataattgcttccatttctttagcaaggtatgttttttcttgtaattaatataaaggagctaaaaattttcaacttatttgctcaaaagcaattaaaacctagtcaaagatctgctaacttataaatattaagaaaaccattcatttttttttcaaatggcatgatttagttatagatttgccagagtcaggagaatttcattttctaatcttttatgtcccatatgaaaagtttctcaaataatatttcttctgcctgtgttttttcaaaatgctttcactctcattttgcatctcctctgtatagacaggcaatttttgcacaacatgatttttttttcctaaataaactcagttgtttatcagatagagctaaaaagtacccgctgtatgcaaagcctaatttacactgacaaacttaaaacaattctccactttggctttcccattccaatttactgataactttacacatctaatcctggtcctagcacaagatcatgaatgctcttcctcaattttttacttagagtgttaatggaggaagaaagtggcattatgttctctatataacgttaacaaaacttattataaaataaaataaacaggtaactgggtctttttcatccatacaacccaaaataaacagcctgatttgtggctttgtctacgaaatgaacagaaattaaaaactaagggcttgtaaaacggaatgttctattagctcgcttaatattgccttccccacatttgaaaatacaaagtgaggaggggtggctatgcttgattagaacagcttagctactcttatcttttacctggtgggcttctctgatttaagctggtttacatccatggctggcacttgaaatactaacctctgcatacaaacaaatcctgaagtttaaaaactcctcttctgtaacatttgaagaagatactctttttggaattttcagaactgcatcttcctaaatcattctcattctgatcatttctgactttcatacaaatgatagtcacagcatatactgaaagagacagacgtggaatatacaaaaacagaggaacatatttgtacttagattttaatttattacacaaagtgtatatagatttaaggaagtaaataattctgaatttaaaagcaagtcaatgtatttagtgaataaacatgtaaagagttttaaaatcactgatatgtaacacttccgtttcaaaaacaggctgcatgagaaatgtcaactacagaatttgatttttatagactttggatttttgtattaccaacaaaagaacacataagtaatcatatgccacgattaaacggtgatttaaataaaaattataatatttgatccataagagccaatgataaaatccaaaatgaatgcttctaatgttttgatatcatcttaaaaacattacaaaagaattacgaatatttcaaaccagaagcaatacaatgtattgtacaccaacagaatttatcattaacatattttaaagcaaattatggaaggaaataaacagcagcctcatgtatagggcgatttagggaaccatctcatgttcaggcaaaagggtcttactcaggagtcatactctttcttcattttcctgttcattgtattgttatagtactgtctttgtaaatcgtcttctgttaaatttaaataatcatccccaaatgcaaaatgtactaatctaatcattgtgaggaggactgctaaattcagaatttcttctccaaataattactatcattaaaatcaatattatattgtccccctctttttaaaatacattctgaagtttgttggtggctattaaataaaagatcatgcattactgtacatccttttattaaaaagcaacttcaatgagaatagcaataaactctttaaaaacaaaaacagttatttgcatgagaaaaaaatgagtgattgaatcagcctcacaagtttctctttgttgaagtaccagttatcatacaagccttaggaatgcgtggcacagtactgcagaagtcagacgataaatttaaatgtccttgccaaactggtaacctgccttacataaacgacacgacatccaatcaaggtagcacgtggttagggatttttctttttctctttggtaaactgaagagatgtgacagggaagaaccccctaagatcaagcacaaaaggaaaatagatgggggatactgctgacctgaacctgatttcagcagcagttaacatggtagttaattcaatccaagctatttctattacatgtctaattatttgcaaagctttggggagagcactccacggtaaagcaaagatacatccatctttgcttcaaggagcttataacccagtgtgacaaacaggcatgtacatagtttaactgtaaagaacaacatgacaaaaggtagggcatttgcctctagtagatagttgataaaataattaactcatattttaaaaaagcattaacttttgttggaagttaaatttagggtgatatgacattgtgtgagataaaccatatttctgttccacactgagtagctattctgccatgaactctgataaaatggagtggcagtcaacttaattatagatagaagttatctggagaaagctgatcagcctgcctttctgaggtaccttctccgaatttaacgcagttgggaaaaacagaaacattttttttgaccactatgtgaaaactttaactcccctacttagtttccaaaaagctaacagaataaaacctcagtttacctatcaatattatgtctcgaaataagatggaactctttctcatctggaaggaagatattaacagtacctgccctcctaaagttgttctgaggattgaatgtgttgtttgtctaaaatgcaactgtacctatattcttctcttttctcagctgaaggacatatcaataccctgttgtggatctgaatcttattcatctttaggctagcgcaaatacggcccacaaaataccattttcccagacaacccaagccctcacaatcacattctccagtgtcctgaatctcccataggtgtcactacagaaaaaaacacttacattcaataaaagaaaagacttttgataatcatcctctttaaatcaggaacactggacccaatgccatcgagggccctgctctggtctgcctctggccatacccctcaccacagaatgaggagtctgtcaggacagaggaggatgtgcccattcagggcctgtacttcccatccacagtactccccaacagaactttctgcatgatggaaatgccctctttctgtgctgtcccatatggcagccactacgcccatgtggctactgagcatttgaaatatgcctaatatgactgaagagtttttaattttatttaatctgaattaatgtaaatttaaacttaaagagccacaggagattagtgttcacaatactggccacagagaattatatggtcgaggccatcttgattgccaatccattattcacttctttgttttcatcttccctgatgttcatcacagctgggcaaccacttcttcatgaagtacttgcttcttctgacctctggggcaccatacttccctgtttttctgcctgtatctctccggcagtcttcataatcttctttgttggctctacccattgtgctcaaactctcagtactgagatgctttaggactcagtcctgtactctctactctaattactttcctaggtaatctcacatgtcaatacgtcattcactatgaaatctctatgtccaaagacagattcccatagccaacagtgtatttgaaatcttcacttagcatttaaatgtaacaaatccagagcagcagtcttaatttctcacctctgcaaaaagccatctcctcttacaatcttccccctgtcatttttgcatcaacacctacctagtaattcaagacaaaactaaggggctaatctttgattcatttctctttcctcactccaaatccaattcataagtgagaacttttaattaaacttccaaatacaccccatattggtttacattacttcatccctaatatcacaaacctagtcccagtcaccatgatctctagtcttgatttttgcagtggcctccagacccatcttctgcattcacacttgccctcatcaccacccagtctctgcaactgctgatcaatgatgcagatgtactttaaaacaggtggtcacacaaaagtttagtgacaagtggtcatctgaatcaagatttgaaataagagaggaaggatcaagctttgctgatatctaggaaaagagaattctaggaacagagaaaagcaaggaccacaagctataaatgaagaatagcgctaattcaaagggaaatggaaaggtgctgaaaggtttttaagcttgggagaaaaacctggtacacagagaatacgttgaagggagtgacagcagaagttagagaaaccatttaggagacaatttgtgaagtctgagcgaacagttagggagatggagactaatccagataaaaggcatttttagaagttatgaactggatgtggaatgtgaaggaatgaggaagatcaaggataactcctatgattttggcttacaaaactcgaggaaggttggtgttacttattgagttatttcaggtacattaagggatagttctgatggatggtggtgttggtggtggtagtagaggtcagaatcaagggacatgacaagggcaggtacatcacaaaggcagtttccaagaagggacaaaggtcaccaggtaccagtctatggaagtgtcacaaagatgaaggtctgaaattctagccttcacatgccatgtatcctcaatgggaaatgggaggtttgccattctgactatatagttaaatagaagagccaaacggtttcgtacatgagcatggagtacagataatttctcttaattctctccacttacctttcaggatatccattaattctgcatgaatctgtgctcagtgatagaaaatctgtgctcagtagaaaccaaatgacaaaattaactagcagcaatatggcacacagctacagcagctatttttgtgtaaggtgaacagccatatcagaagatggaaaaataggggggtagggtgagggagagcatcaggaagaatagctagtggatgctgggcctaatacctaggtgatgggctgatctgtgcagcaaaccaccatggtacacgttaacctatgtcacaaacctgcacatcctgcacatgcaccccagaacttaaaagttgatgaaaagaaaaaagacaggaaaacaaatccattggatacttcaaaatgccaaaatgtaaagaaaataaaagtataggccaggcacggtggctcacgcctgtaatcccagcacttttggaggccgaggcgagcggatcacctgaggtccggagttcaagaccagcctgaccaacatggagaaacccagtctctactaaaaatacaaacattagctgggcgtggtggcgcatgcctgtaatcccagctactccagaggctgaggcaggagaatggcttggacccgggaggcggaggttgctgtgagctgagatcccgccattgtactccagcctgggcaacaagagcgaaaatccgtctcaaaaaaaaaaaaaaaacaagaaaagaaaagtataacttttttagcatatccagccagagcaaaaccactcactcactaattcagatcttgcacactcatatggttcatcatcatcagggacaccaaaaatcttcaaaaatagaaattggtgatacatgtgctactgaacaaatataactgcctaattttaatctagatagtctaatctaaataaattgtctaaagtcattcataataataaaattaatgtagtaaagatggcaaagagaattaaaagatgatatggtttagatatttgtcctgcccaaatctcatattgaaatgcaatcctcaatgttagagctagggcctggtgggagctaactggatcatggggacagatccctcatggatggcttactaccatggtaacgagtgtgttcttgccatgagttcacaggagatctggttacataaaagagcttggcccttcctcctctctcttgctcctgctcaccccatgttaaacggctacttccctttgccttccaccattactgtaaggttcccaaggccctcaccagaagctgagcagatgttggtgccatgcttctaccatgagccaattaaacctcttttctttatattaatagattgcccagtctcaggtatttcttaatagcaatgcaaaaaaagcctaatataaaaggtatcttcatttttaaaaaggttcattttgttcacatggttttacaaaaaaaacacacaaattattcctgttcatctgaaagtactttaaaatctttgtaaattccagaataagcatttgtctgatattggtcaagtattacctccatgaatttaaaaaatgatttctgaaaacagctctcttaggaaaaccagtataaaggattacatgacaggaagtgattgaatacataataatatgatgctcttttgtaaatctgttttatttatacaaaagaaacactgaatattgatcattgtatttatgcgtctgattaaaaatttcagaattttttttttttgagatggagtctcactctgttgcccaggctggaatgcagtggtacgatcttggcttactgcaacctttgcaccctagactcaagcgatcctcccacctcagcctcccaagtagctgggaccacagacgtcagtcaccaagcctagctaatcttctgtattttttgcagagacagggtttcgccatgttgtccaggctggtcgtgaactcctgagctcaagtgatctgcctgccctagcctcccaaattgttgcaattacagtcctgagccaccgcgcccggccacaaaaactttctaatttctaaacaaaaatacttcagactgaaataactttaggttacttctaatatttttattacaatagtccagctaagtcattaagactgtgttttgattatgaatgcttttggtgaagaaattagatattgctgctatttagagcactaaagacaacttgtagcatgtataattctgccattcattgtttcataaaaacttttatcagcaaaacaatatattttcttcatctttcatctgtgttagttaaaaagagaaggttattgtgcttcagtttcttaaaaacaatatggtaagtaatcatccaaaaaaataagaaaaagatatatgcacatatcttattgggactgtcacaaaagaaacaacaattttacagaaaataaatgtttttatgctttataaacctttcttacaagaatgtcatttgaaaaggaagaaatctcatcagattttaagggagctgtgaatactcaaaacttgattctttgctctatctgccgtgcttcatgctcttcctttattgtcaaaaagcttacctatggaggctccactgcatttgggaaagtcacttaagtcactccactgcatttgggaaagtatggtcaacaactgaaatagcaataaaaatgctagaactgtgttcctataaatctcctacaggatagtaaccacactgattttgtaagctaatgggattttacagattattttagatccagactgatttatgtagacttgccaacatctcttgacatctttagtcttcttctgttataatttctggtagaatccacgggagtgtgtgtgcctctctccttttagaaggggattggagagttgggtagagacacagaaagccagaaaacataggcagaagatatatgtacatataagatatttaacatttatatacaaaatgtctatataaaatatgcatgcatgtatgtatatgtgtatgtgcatacatagcgccaatctccattttatctatgtatatattccctttgcagtgacttatagcactagggtctaagttcaaattacactaagtagtattcatcatactgtctttgaacacctggagtaggcacttgcagtagtgtgtaatgtctacaatgtgggaattattacgctcactttgcacatcaagaaatgggaaatctaagaggttaactttcttttaaaatatctcacataaatttagaatctagccaattattctttttctcaattaccaagtactgtgactttaatacctgactgctaagaaaactcaatgataaatgtgtgatgtaaactaaaaaactcatattttgaaggactactttttacccaaaaggacccaagagtatcattacatttttggcacattttatatatttttaaagtataagcaaagataatgcaaaataaagggctaacagagtaaaaaatttagaaaagttgaacaagcacaaaataaaattttaaaatatttaagcaaaatgccatttgtttagaatattacaaaataaaaggaactaaatataaccatgcttttccaaacagtaggtggtgaaggtgtctttctaatacaaagtagttctgcatttttaaataaaaaaagaaccttaaagctgaattttgaagcctactcttcacaaaatgtcctctaagtaattatatgactaaattacaaatattataaagctatgataatttgatttatgaggcatatattgaccttaatcatatgtgaaaatagagaacacacaagaacaccgtctttaaacatgcccatagtaggagcatatctggtcttatttgtagtttattattatcagagcaataattactgatttcctctgattttctcccacccaacactgtattccttattttctgcctgacataaatatcaaggagcatggactttacaagctttattttgggctatatttcaaaaaattattaccaaaaatacctctttctttcaagtaatgaaagtcagccttaaaaagtttctgtgtgtttgtttaaactttctgactagaaaccccactcttcccataaaaacagccaaaataacagacattgatatcaggattatcccacgaaagaaataatcctttttatctcactgttattttaaaaaatcaccttacatacttgtaagtggagttattttcatataattttaaacgataatgattgggggaaatcattttaattttctagtgaaagctttaaaaaattaacagacacttaatttaatggattttactatgttgttaaagtttatgcaaggccattggtttagaccagcctcctgcactaggccccagcagactagaccaaatcagaatggagtcacctacactaagtaacataatcaaacctatcttgaaagagataagtttaaaaaaaaaaaataaaagattccagtcaatctgagtctgggtaataagtctcctctcttttaaccctataaggaaagtaaatttgaaacgaccaacccactcttggttctgtttctgctttccttagtccttttctgcctagaaagccaactacctctcttagttcactggagcccttgtggtattttaaagaataaggtattggcattctaaaattgcaaataaaagacaaattgatcttcaaattttgccttttgaaaatggtttctccttaaagaacaaatgtagaagaaaccagtcattttacacctttaaatactatgcaatgttgaagattaaaaaaaatacaacttcttttcaccttaataagactaaagacacaaaggataaaaataaatattttcaaaaggaagcagaaagcagaaaatattgttctggaacagtctaacattagaagtaatgcacatatacatattttttcatgagtatgggtaagtcagcaaagattttaaaaataaacttcagccagaaaacatttttatattaaaagtctaatgttatttaaaatatattttcacatattttagaaaatgtagatttctactcataccattgctatgcagataaaaattccacttgtttagaatgacccagattaagaaccatctcctctcctctcaacaagttgaatacattaacattgggacaaatgaaggtcactattcagtgttttaatattgatatatttagtaactcaaacacctctgccttaaaaagaatgttaaaaatgaaatgaaggtccagaaatacagttttcaagaatcatggaaaacaacaagttctggacaagcacactttcaaaataattgtaatcaagactggtttgggaagaaaacattgctaagctaattgtgcattttcttgccttcttaacaaaaatggagatactatcaactctttctgggtaggtatactgtttatatacctcaatttttgtcttcttctaaagatacagttggtgctgcatatgcagatgacaagaacagaaattggtaaactacagttttcctataacttttatttctaaagaagtttctgttgacagtttgcatctttggatgacttatctttatgagtaaagcagaaaaatgtacaaacttgtaaataatataattatctccgaacaaaaagtaacattgtatcaaaagccaaagtaataatctcccaagaggtcaccaaccttccagaaaactgcttcatcactactgctgtaaatgattgacttgtctatagcattcattgacaatatttttttttttctgtgttactacaagtagctccttcacagcaagtatttatcctggggcccagtttgttgttttaatggtattaacttatgaatttcaagactctagatttgggcattttaagaaggcctttttaaaaatctacaaattcttcttcatcatcagaaatctctcctgaactattgtataatctgaatggtactctggaataacaaatgaaaataatgggacaacaatggaaggcaaagagagtaaaactaataagaaatagtgatctcacttttttaggatgaattctaaactcctagagcagtagaacagcattactgttctcaagaaataaaactgacgttgaaaagaacttttagtaaagattcttaaaaacgctagaatcaaatgtccacatatatattcatttgtatttgaaaggtatagacattttaccaccactaagactttatctactctagcaggtatttaagtaaaataggaacgtataaaaaccatggccaaaacaaacaaacaaaaaacagttaaactcttattttgcttaaggttgacatctgctagtatagaaatctaatggccatcaataaggaatctgacaaactagtatccatacaacagagtactatacagctattaaaaagaatggcatagagttatggattgctagagaaagacatctaagttattctttttagtaaataaagaaactgaaagacagtttttgcacagcaacatgcaatttgtgtattcgtagtatatgcacagaccactgtctcagttacaataaaccatttactttgcttatatttgtgggaatagaggtgggtagggtgaagctactactctttaaccataacttacttaaaatttttcttaccacaataatacattgcttttgttataataaaaagaaataacataaatcagcactcttatggaaatgtaaatgtgttcagataatacactatgttcagaggcaagagctttgaaagagaaaaaaaaaaaaacccttttcttatttcctattctgctgactgattatcagcccccaaagcaggctttctaacatcttattttgaaaaggcactctttcaaaaaaatccttgccccacacctccgcaatgcttttccaattagcactgggtcagagagaggggcaccttcaaatctcttttctaatgactaaataaacacaatccatgtgatctaatttaattatgtgtatggtgtggctcttctcattaggtttagttgactcaatttctgccagtaatttgatcagttcatttttttttcagtctcattgttttagaatgcactcaatcaacaatattgacttttttttttttttttttttttttgagacagagcctcagcctcactctttcgcccaggctagagtgcagtggcgcgatctccacttaccacaacctccgcctcccaggttcaagtgattctcctgcctcagcctcccaagtagctaggactataggagcgcgctgctatacctggctaatttttgtatttttggtagagaaggggtttcaccatgttggccaggctggtcttaaactcctgacctcaggtgatctgctcgagttgacctcccaaagtgctgggattacaggcgtgagccaccatgcccagcctaatattgattgtttactgtgtgccagatattgttctatacagatttttttaaataaataaaaacataaatgtgcttgtataattcaccatccagtcaagaaacaggtgctgtgctgggtaggtaagtagaggaaatttaatgcagacggcaatagagcacagcagtcaaaacggaaacagggaagaagccaagattagcaagagcaaatccaaaaagccactttcatccctagaactagaaagaccaaaggaagagacaatgttatcagaattcagggctggctccatcagaaaggaactagaacaacaagggctcttaggagctggctaacgagcaagtaactactgccaaaaaaggctgcccgagttagtgagagacaggggaagatgggtcctggatgccccactcctttagcctttgtagttgtctgtcaatgccttccattggctgaacctacttggaggcaagtgagcaagcagacgggacatagtttgcagaggggcaggaaacagataaagcaaggagacgtttagacttcagtaatgattagcatttaagctactcaaaatctataaaacttttcgctctcaagatgtctacaaaccatgcacaccaatgtatatgggtacatatacttgggacaccacattcacaatgaaatgatgccctgtaagtaagatacagagtgtcatcttttgagcctgcagggatctaagagagtctcctaatctcccaccaatatcatctacttttttattcttttaaaaatttctctccaggtaattcataagaggttgtcaccatgaatgccattatatttttaatttagttactgatggagcatagataatattatttactttagcacgcccactctactaaactcatcatttaacttaatcacttttttctctcatttgaggtattcaatcaatttctcttaagctaataaaatgttcatttcattttatttagtactttttgtatcgcatatacacactgaataggcttttctaaaacaaaacaataataatgattgtgctaggaggttgttggcttatcttctgattttaatgaaaattcttttgactttttccattaaatatactgttgactatgggaaaaaatacccaatccgcttttaaataagttctattttttagtatttttataaggaatagctgttgaattttgtcaaatgtcaaaatttagtgagaggattatagagtaatagttcttatttatcaacggatttccttttgattccttcttctatctctgttttctcttaatcctcctatatttcttggcttatgtggaaaatgtcttggcattatataataaagccagccaacaaacgtatttctttctttcttgctgggtatttccatttatgaaccacataattacaatctgacttgaatctgtggtttccccaacacaccccctgtagattcatcattgctggataaataagttgcttttttgctgccaaatctatgtttttaattcagtttctagattcagagctgttctaggtggctgaggttattgtctaacttctgagtgacagaagatttgtatagatacatgagatcctagaacggctcccttggaacacttttgctctcacatggtgaaaccacagttaagtagtttttccaatggtgtgctttagtctctagtcgtcttaaggataagatctcaccctgacaaccaggcaacactgttcacatcacataattctcttgtgtacttggtttgggtgatggaatttttcatatatgaaattatatttaagacctgaaacattagaaaagtaaaataggtgctctgatctatgccagtcctcgtatctttatagtgggtggttagtaatgttgacattgaagacaagggttacagggtgaattatgaaccatatataaaataaagagtgggcggcactacacagggcacaggaggaaggtcaaggatacatcagggagaaatgagtgacagggagcaataaaaggctgacctgactgagatggagggaatggacaataggtagtttgatattagattaacaagttttgcagacctaaatcagaattttgattataaccaatattgcaatgagaaatcaccatggaattcttttttttttttttttgagacagaatctcgctctgtcacacaggctggagtgcagtggagtgatctgggctcaccgcaaccttcgccttctggattcaagtgattctcctacctcagcctcccttgtagctgggactacagccgcgtgccaccacgcctgactaatttttgtattttttagtagagagagggtttcaccatgttggccaggctggtcttgaactctgacctcaggagatccacccaccttggcctcctaaagttctgggatagaaatcaccacagaattctataaatgggaagaatacaaagtgatgcaacagaagatggggttttgagaaatcaggtcccaagtatacttcacattcaaaagaagatactaaaatcaaaaatagttgctataaggcaaaacatgctggctctttcatgttcatgatgactcagatagtagattatattgaacagttagttgccaattaactagctttaaaattttggatgagaaacagtttctaatgaaattaaactgtcacactgagaatgagatttttttcaaaagcaatggaaatgtaggggactttctgaatgtctatgtgccaagcaatacgcattctgaggatgatggatgaaccctgctacagtgtcagggagcctccaagtctctgactgagacattacaaaaagctgacagtaaaaatgtggtatattcagctttatctatgaaggaattgttaatagagaaatcattagagcagcatagtgaggtgtgataagagtttacatccccatctaattcatttcttctttgaagcatttttaatatgtaataaaatttctctgaatctaggctctcttcagaattagcaattctcttcacattttgttatttaacctaaaacctaaaaactctttttgcccatggagattcattaaatccatacatttgggccctaaatgatagactcacttttttcttttctatactacaaagccatataatacaatggctttcttggttctctccaagaaaatgatagagatgagtatttggaacgttgaagactttccttttattagttctgtgttttattatcctaaaattctaaactcataaaaagttcctttcctgggcaaagtctttgtcatattttatatctggtttcaagaggcaacaggccggcaaaactaatggtgactttcagatctagcaagtctatctttggtttgggggtcacatttacatacacccatacttaagctctaaatttgtttcccatggcaaaaatgaccttatcatttctgagttatagtggaaggagggaatatcaaatttacagcatattgaaaacagttaataaatccctctgatgaaaaatttaaaaaaaaatctgcctcaaatgaaaacagttcactttgctaaccaaaacacactacagctcagtatgagtgctgtttccttatttttattttgaatgaactaacagctttggtaataaattcagcttcccaagcgcaacatgcatctacaggccagacatcttctgatttgtcaaatctctatttgacatatccatgtttacgacccttgggccctttggatcccactcaggtggaactaaatccatcagctcccccatccgaatcaggtattcctccagggctctctattccagtatagaccaataccaaacgacgtggcattccagaacagaaactcctgcctcattcatgtctcctcctttttcaacccccaaattctgtcagtctttaaatgttggctatttcataccccaaattgctctctaatttatctatttctcttcacacctgttacacatccctattctaagccaccatcatatatcacacctggattaatgcaatagcttcttaactgatcttccaggattccttctgcttcttcaatctattatctcccaataactatctacttatcagcaatctttctaaaatacaaatctaatgatgcaatgcctctattaaaaaatgttttggttgttctccaattattttagcatcactttcaaacttgtctcataatgtggtttctgtttattcctctaaaatcaataagcccactcctatgagcccctacttgccctattagtttcagatattctgaactttaagttcttcaagattctacattctctgttcatgcaggggtccttgtaaagatagttcctgccagggtacgctcttctccctcactacactcacctgcctaactcctgcttctccttcaggcatctacatagatttcacttcctctaggagagattacttacctccaaaacctgaagtattcagcccttcttaatatatatttcctatgacagcatttcttttcatcttaccaaaaatctttctcccttttgtatgatctgtgcctgtgacaaaataaactcctaacaaaaaattcaagggtaattaaccgatgttaaacaatgattatcaggtcaataatcttcagatacaaaggacaacattctctctctcattttcttaaagaaaaccttattacaggatacttgtagaatgtttcctattaaatttgcccactaatccaaagctgaagacagagataaccacttcctatttaatgacagtcataaatatctagggccagacaattccctcagggctttttaagatgtggctaaaaaagctctcctacttacaaccttcatccaagcctggcccacttattaagtccataatgaaaaaactggagagaaaaaagagtgaatcatggagtcatgtgtcctctgtctgggatgacagggtggggaaaggaggtggacaaggaggggcttaccctaaccaaaggtaaatggataggtcccaatagaatctctcataaaaatgacagtacgcccaagaaagggtaacttactatctcagtccttgactggacacacatttacacaatactccttattgattatccttccatttatccaaaaatgagaaaaaagaaattacagaccaacaggtaatgaaggatggacgggtgaggacacagcccacactccctccttacggcattacaatggtgtgagagtcccatggattaagggacactgcagaggaagctggcttgtaccctacaaaagttatccagccatgccaggcaactgcagcagaaagaggcaatgaagtgtgattctggtggcaacagtggaggaagatggggtaaacaaaagtcatgccatcaccagatgtctgacatcagggaatggatgctgcccaggaggccccccagttggggccaccccccaggaagggggctggagtcatggccactgggagactgaacacaaacacagctgccctactttaagaggtcctctaagaaggtggaataaaagcaagcatgatctatatgggaaacaccacatcactaaggccaccagcagcaagaacgagaccaagccggaccagactatgaagtgtatctcattgctgccttctctccccatatccgtctgtttccacctaatggaaggaggggaagtaagtgacttggaggacaataatctctcaaccccaaaaagcacaccccaagatgagaaacagaaagctgaatctgaaaaaacagaatatatattccctcccctgagctatgtggaaaagcttaaagttggatatgaggctttgtgatggttactggcttaaggaatatgcagacagctggtaaaaacatttttctgggtatagctataggggtgtttccatgaaagactgacatttgaatcagtggactgagaaggaagatccgcacttatccaatgtaggcaggcaccatccaatcagctgagggcccagacagaaccaaaagagagaggaaaggtaaatttgctctgtcttctgaaactggggcacccttcttctcctgctcccagatatcagcactccaggttctctggcctttggaacttgtaccccaaacccccaaattccctggttcttgggctttgggacttggactgacagttataccactaacttacctggttctccagcttgcagacagcctactatgagacttcacagcctccatcatcacaggagccaattcccctaataaagtctcctctcatatatgttgtatcctatcggttttgattctttagagagccctaatgcaaacctgaagagtgaaactaaactgaaagtttttcgttaaatagacaaaagtcactagtaagttataggaaatacttgagatgtcaataaagaaaaggaagatagccctatcagactcatgaaaagtataaaatcacttcacgtttatattaatactttagcaagttcaggttattcaataatctgactggagatccggtcgtcataagggatttagcatacaagaaaattaaattatccaaggaagacaatgatttgctagagtagatgagagttggtatctaattagacctccacatgttaaagagaaaattcatttaagccatttcataatactcaatatacaaaatcattttgttgcaaactacttcctttaaaataaatttattaattgctagtcacaataactagcagtcacaaaacaggtgtccataaaacatgagaatacatcctgaatcttttaatacattttttcagtacattatagcataattttaaacatcagtgaaatcaatttattcaggactctacatattatggaatgattacatggtttccaaatatgcaatttcattatttctcatgaaaaatcccattaagtacatagaataactgtgaaactcctgtattctctcatttaaaaaaaaaaactaatcgtgcatagtaaaaaaattgtttctccaacaccacaattgaaattgcattcttgaaagaaagtgaattcattctgctgccaaaattagtcaaatgtctacatgtttttcctttaacaataacactgtattggctcactagatgtattcctcatgactataaatggaggaaaacaatatactcctccacacacattctcatcagggttacatttttgtgggcccgtctgctttaaattttacaccaagaaaaatcttgaaagttctgagttctagttttaaaaccagaagataaattctgaatcatagactgttagcctttggaaaccacttccagggtaacttaatttcaagacgatttgataggagtgtctttttctttaagagaaatagacctctgtaaacagtcagtgcatatacactaaactcatttaacatacatgggtcactcttaattgtgtttttgtgttgctgtttatgttgtttgttcaaaaacttcatccacattcagcaaacatcctacaattagctacgacttcacctacagagacaagtagcacaatgtcaggttcctaatattcctttgaaatttacttcaaagctgggctaaacaaatcagtcagaaagcttcagccaagtagtccacccacattcaacctttttctacctaatgataattacagtctgtagaacaggcagtctctaataaacagcatcaactttagaacacagatgtctggaggggcctttttgttgccatagaaatatcttcagtccaccttgtcctcagcactaaacattatctttacattagcctcctattaagggtgtgtgtgtatgtgtgttgggctagattggaggtatatattagcccaaattataggattgctcactctgtcctgatggttataaatgattgtggtccttcattctaaaaaaaaaaatccccaaaatggagcacacaaatcttcctggtgacagcagcccctgactaataggttcttgctcccttggctcaactgaaaacttccctaatgcagcaaagcaataaagatcagcaaagaattctctatgttccttctctccattctaagctccggaggtcagtggctttctaaagtaaaggtatcatccacagttgtaaaacaggaaaataaatctcattatatcaacccaaacatgaatgtaatttgagagtcattaattgagggtagggatctaagggactgtaatcctgttttatgattatcttaaaggttgtttttaaaagaatcagatgaacttccctgaagcatacaaatggcttaaaactacaaattcattttacatagccataaatacttttagtggaaatattatacagtttgagactataggtacaaaatagaactgattcacctataatgcttatagtttaatgtgctgattttaaaggccatttaaacagaaaatcttaacatgcataaagataatttaaaaaggaaaagaacaaaagtgtaattacttggacttttattatcccaaaatacatacggtgtgtcagagattaagtaaggacagaaagactgaagaacagttttagaagggtaagagattcagaaactgtacaggagagtataaaaaatgttttaatgctcaactattttgaggcaggcattatatttctcagtcattttacacacctaatttgtttaattcaaaaatgccagacattgcaattggccttttgacataggttatctcaactattttttaaaaaccatcatgggaggaagtggcattagaatatcatttccatttttatagaagcggataccaagcttaggaagattaagtgacttacccaagttcacagacgtgcttactgggctgccaggaagtgaaaatgattctaattcaatagctctttccagaactgcattacggcatgactttaggtgttactttatttaggagaatggtcgcacttacacaaaacattctaaagtgttctttagacaaactttctcagcacacagtaataattcactgttaaatcacaaatctttaatgttccctctattcttttaattttcaaagataatccctaattgtataagtactaaatatcccacttcactttcaatgaggtaactcactgaggtgactttcaatgcaatgatttaaagttccgtgttactttcaataagatgattgtaactaggattgctgaaagtttaacacaaggagaaacctaaaaaaaattctgtccagcaacatgaccctgagttatttggttaatgccatttcttttggagaactgctgagacatctatctgtatattctccattagtttatctaataggacacagctggtttattcagatcagttctcctgtatgtggcactgataaattatctttataattattttgacaaaaatgttggcccacaaatcaagacattatattttttcatctgggttaccccaagttttcatgtaatatgatctaacaaaagatatcttctcacttggctggtgtctaactgatacattaattttttaagcaatgctggttttttttaaaggtctgttgtctgtgtggcatctgtgtgtgccagaacatgctgtgatagtgatgaagtgatcttcatatcaagagatgggcaataaacactaaaattaaccaccgagtctaaagtcttattaattatggcattccacaaacacataaggctgtaagtaaaacagtacaagggaaataaaagggaatgacaaatttgatataatatttggaaatatattaaaaagacaaaaacctggctatcttttcaggatattcattttactatgaaatttagtaggatttgtacctaaagccgaattcaagaatagaattgtatacttactggtaaatgtttattcacaaatcaagtcatacaattctcaaaaggtagatcgcctaaattttaacaattgggtgtgtgggaaggttcatgccctagaagtatcacaatcttcaactactcttgaactcaatctacaacagaatcaagctaaagatacaatactgcaggggtccccaatggcccatggcctgttaggaacctcgtcgcacagcaggaggcgagtagtgggccagtgagcctttctgcctgagctccaccacctgccagctcagctgtggcactggattctcataggagcgggagccctactgtaactgtgcatgtgagggatctaggttgcatggtccttccgatgatgtgaggtggaatagtttcatcctgaaaccatcttccactcccacacctttggttccattctcggaaaaatttcttccataaaactgggccctggtgccaaaaaaggtgatgactgctgcactagtgaacatgaggcagcagttggcatcaaggatgaccataatcagacatttttaaagacaaatacaacatgggcaatcaacaacctttgggcaaacctctggaaagcaaggctagcaatggagatataacagctcagaaataggcaatcgtgactttcagattttaaaaagtcacatttaaaggatttacctgttaattatagctattaaggatcccctaataaaatccactacccgacacgtcctagcacaagtgcaacaaatttgttttctgggatgtataggttgattcatgtaacaatcattgcccaaaaatcttttaagttctgttccttggatggtttaatctatcgtaaatgcaattttcattggagaagagagaataatgtgctatttcttatttacctacttcactaagagatggaaagacagtttctcatgttttctttctttcctttttttttttttttttttttttactaattcagttcatttaactttgcctccagcagctcaccataaaatttgggtccaaaaaggccaaggaatgtattatcagaaatgttagctatctctaggaaaatctgtcattcatttaagtgataatctttaaaattagcataactatattctggatcattttattacgagactatcatgtgatttcaatgtctgagtttattaccattgtacgagcaacatgctaagttacaactgtaactcccagggttggtttagcaggaaagtgatggaggcagacttaacagtgatgcgtgtagttcagcaaaggccaaatgacagcactgggagccataatggtggtttcctagtaattcaaacagaggaaagtagcaagaatacactgatctcagaataccaggcttgtcagactaaaaaatcctgtgctttaacagtcagtggttgacagcaacttatcctaagcaaaaaaaaaaaaaatcatctaaaacagatgtcatggtaatttcaattttatagctttctgaagtgttgattctatttaatttgcatgtttgttttgttttcatggctgtataaagacctattacacaagagttcaaagcctgtttttaacatatacttaatctcatgcaatattataagccaaaaaattaaatatgattttagaggtattctattcaagatgatttttcccctttagaaggacctattcattactcaaatttaacctgcagtttaccattgcttctctgttattcagtcacctataactttcaaattattgttttacttgtaaaaggcttttaatctttcctgccaagctaaaatctgagacagcgctaaccttttttatgttcatggggctctgttgaaatatgatatcatcatggataatcactgctaaattaatcacctaggcaagtaatagtacaataactttacaaatacacaattcagagtgaacccaacatatcttaacctaagtccaagaatctccatgaacattatttcttgttctcttgccattgttaatttacgttttaaaaaaaatcaattccagaatttaattcccaattactttagtaacttgaattaatttagtaacttcagtaatctggatttgtactgtattgttccccttatatcattgcagtacacacataaaagcagataacatggtgaaatactgcactgaaaataatcctttaactctggatatataataaaattttgttaatgtgcaatacatttttttttcacatgaaacatccatcagaagtttttaaatgttcatgaggatggcttctctacttgaaagtttcatttcaaaatgctattattcctccaaacttaattaacctatctaaaaccaaacagatatcttttcctcaaattacttcatttcaccttcccaactcttctccatgcctgtgttgtaatcataaaaacctagaatgcaaatggctgtttgatttcttttccttaatatcagatcattcatttgattacactggagtttggtttaatatgtgtattgattgccttttcatcattactcctgtatcattcatccaagtcatcaactctcaccacaacgattgtgaccaactcttagctgatgtcaccaactccaatttttttagtcccccaaatgctctaaaaggaaaaaaatactaaaatagattttttgacagatactctaatattcatatttttgtttatcctacttgggatactttgtacaacctgaatcttggaatttgcatgttttattagttcataaaattcttagacaatatgctttcaaatattgactctcctttttctcctgtgggaagtctgttaatacaatctatcattttacatttccattttcctttgtgtgctgccttctgggtaattcttacatatattttccagtttactaattctctttagctgtgactcacctgcctcttaatctattccatttttttatttctacaatatttcccatttttagaggttccatgtggttcttgttcagatcttcctgattactgtcaacagtttttcattacttgctcacttttgtggttcatcttttatttctttaaataagtacatacagccactctatcttctatgtttaataactccaatatctgtaactccttaagtgtttaaattctcagtttcattgctttgcctaattctcacatataatgtcctacctcctcatcaagttggtgaaaaatgattgtgacctgcctgatcttagtctgttaaaatcctggaaacatacaatatggattctagcgaggggatttctgtctgcttcttctgaaagtcagggtgctactgacttgaaaactgtttagcccatctcaaaaggtcctactttaatctgggtatctcaggttcaaaactttcctccttattacttgcccaaatctaggtattcaaatagtgatgtttatatacattggtcctcagagcaatcaccattacagttaccagctctgattagggctcatctgttctattttggtaagggggacagtagaagcacatttcttctaagagattttccactacttaatccctgccagtataacccaaattgtgtttatcaaagatatggttgtgaaaagatacatcattgaatgcaaagtccatattattttctcagcaacatcaacctgttagtctccattataaaatatatgatggctctttattcattggagcatattaacctcccctgcctgttggtcaataatctgttaatgtcttatgtctacctatggtgcctccagaagcccccttcttccctcactgagccggcctcttgatggttcctcatgttcaatacatattctgcctccattcatacagcattctccacatttagactatcctatcctctttgctctactgatctaaattctgcctactttcaaaacccagctcagacccactttccttcatgtaactttcctaattccaacatttatttgtccactctcctcagctctcagtcttctaagcttaacacaaaatgatacttaattaagaaattcaaaaaacatgaaagatccttataggccacctattaatatttcagtccccaaattcaaaattaatcaagacccagagtagttaagtaacttgaagaaggtcatccaggtgttagatggcacagttcatcctggcatctggttccacaatgtcagtgcagggctcattttaattgatacttcactggtctttcgacacttctgttatcccctctgaacatgatctctgcattcaaggcttcccctcacagtgaaagcctaagtcattacaacgacccacatgattgaccctctcccttccttctagcaaacaccaacctctctggccacatcatctcccacatctcttcccctggcttttctgcctcagacacaatgcctttttattattcctcaaacacagaaacacactcctccttcaggtctttgtactggctgcccacttgcctggaatgagaatagtctagattaactgcctgacttagtctactgcatctttcaggtcttggttcaatgtctacctattagaaataggcctgagcatctaattaaaatattaatgcttccggccaggcgcagtgactcaggcctgtaatcccagcactctgggaggccgaggtgggtggatcacgagttcaggagatcgagaccatcctggctaacacggtgaaaccctgtttctactaaaaatacaaaaattagctgggcatggtagtgcgtgcctgtagtcccaagctactcgggaggctgaggcgggagaatcgcttgaacccaggaggtggaggttgcagtgagccgagactgaaccactgcactccagcctgggtgacagagcgagactctgtctcaaaaaaaaaaaacaaacaaacaaaaaaattaacctttctgattaatctttaaccctcctaaaggttttcattttctttttttcttttgtttttttttgagatggagtttcgctccgttgcccaggctggagtgtgatggcatgatctcggctcactgcaacctccacctcctgggttcaagcgattctcccacctcagccttcagagtagctgggattacaggcacccaccatcatgcccggttaatatttgtattttcgtagagacagggcttcaccatattggccaggcttgtattgaactcctgacctcaggtgatctgcccgcctaggcctcccaaagtgctgggattacaggcgtgagctaccgcgcctggccggttttcatttttctttacagcactcaccactgatatttagttgttgatctctatgctatctgccccactcctcaaagaaataagttcatgattgtctattttatccctactccctaaaacagtgcccagtacatggtagaagcacaataaaatatttgatgaatgaacaaatcaatgaatgacaacacgaggtacagttacgtaatgcacagttggcattgtggcaatggccagagtataaagaccatacagagatcgcccttctccagtagtgctcacggtacaggagaaaatggacaacaatacgtacttgctgatcaacagatgcaagatttatacataagatctttcagataattacaaaatcttttgaaggtgcacctaaaagatcaccttctaaccctcccagcccaaggtatccaaagtaaaatttgcaaagtcttcaactaggttccgtttccatactaccagtggccgagcataaagcacttgtcagaaagaggacctcatttttcaaacaatttgactagttaataagtttttgcttcctcatatattccagttttgcctccgtataacttccaaagtttgtactaactctgcctcctgaagtacacatgatgaagcatacaacatcaacaataaatctttcaaaaatctgaaaatctgttgtcttttcacatatatgcctgttcctctgtggactaaatgctttttgttacttcaatgatgcttaatatgggatgattttcaaatccctcaccatcctggccacatatacctaaacagattgctcattttcagaataaagtatgttgccctcacaggacagacatagcatttccagcacaaagtcaagggaattttaataactgtgatatccagacagccattcatcaatctacatataccaggcatccactaggtcccaacaaacttacgtttgtttaaaaacaaaatttttataggcgcatttaaatatctattaatcttcttggtgttaacttcattcagtccacacttttccattttgtccaaatagcttaagggaaacatctttaaattctttggtttttcttgatctactattccaagaatcctctcaatttggttattttgtatataatcaccctgtacgtgtacatttctatataatttataaattttctaattttatactttcaaacgttattttttttggacacatttaatggctcagcaatgtgagcagaacagaattattagcctcattgataaattgatatgcaggagctcatagagattacagcaagttaaatgtatagctggaaataaattccaagccttttgattcttcatttgtactaagtctcctccactggcccaccttctgagcaggctttattttttcagaaatattcatatttgctccaaattaacacaatctatttaatattattttccccagaaaaagtttggaaattttaaaattctgtagtgtttgaaagtcacatctttgccctattttgaaggtgtaatatttgatagaactaaaagcaggcttaatcctgcttttagaactcacgtgttctagtactcaaatgcctaaatatatttggcaaaattttgtaatcaagtcataaatgtaacactatataataatcttaaactacagattgttctgcaatttgtctttattaaagcaacttgaatcttagccacaacatttttaggtagtggaaattgtgaactatatagcaatgaattcaaactcttgacccttaaataaaaaactttataagataaatagttaagaggggtaggagagagagaatggttgttatcataggatacaaagttttagataacaggaataggttttgagatctatggcacaacaggctgacaatcattaataataatgcactgaatattaccaaataaccaggggtgctatggtttgaatatttgtcccctccaaaactcatgttgaaatttaatgcccaatgtggctgtattgagaggtaagggctttatgaagtggaatgggttaatccattcatagattaattgaataattaatgagttattaatgggttatcatggaagtgaaactggtagcttcattagaagaggaagagacacatgagctagcaaactcagccccttcaccatgtaacactctatgtcacctgggaactctgcagaaagtccccaccagcaagaaagccctcaacagatgtggccccttgaccttggacttctcagcctccaaaactgtaataaataaattccttttctttataaatgaagcaacaaaaaacagactaagagatttattatcaaatttttaccatgaaaaaagataagctaggtgattgatatattagtttgacttagtcattctatactgtgtgcacatcaggacatctcactgggccccataaatgtatacaattatttgtcaaaaatattaataaaatttttaaaataaatgaataaaaataaatagttaataagaggcaagagcataaggtatggtgttagatgaatgaaaatatttattcaaatttcatggctattaaaattaaaaagtttcattaggaagctatttcaactttggttcagaaaatcaatataaaatgacaaagaaagacccaagtctaacactataaatttagtggatatgcaggataatctttgaagatgctatttagcaaaattcatggcttcagtactgcccatgtactctgtagattaacagattaacagccagacacattcctacagtcagggacagagaaacagaacagtggtttagaagttcacagaaaggttcttgaataaatgcatatgcagtgaatttctatgaacttgagagtatttatttccctattctaactgaagaattacagatttttgaagagtacctagaatgtaataaacactatgtcagaagttatagaaataagaaaaatgttcagataataagacagtacaaactaaaagttgcattctttatgtactgaattatggaaatggattttgtctttgtgccttcattctacgtctttattccaaagcaaataccatataaccttttcaataaaactctgtcatgtaggccagagactctgccatcagctcgtgtttctgttccttttatgtttctgtaggatacaatgatttagaataggatgtgtccagggcttgctttttttgttttgttgcaataaggacattgctgatggtttaactactgacttctccttcacaataactcccaaaaggtagtttctaaaatagtttccacacagcttctcaggaaaatgctgcccattgtttatttaatgagggctactagagctataaatatttagtgttctttttctcagttcattatgttcaagtttgccttttcttcttcaataggccattaaaaaaatcaccacagtttatcagcccacaggtgtgggttcccactgtgtggccttcctttaagcaactcccagggaaaaacataaacttaaacactcttttgtggatactgttttgggttgaattgtgttctccaaaatgatatgttgaagtcctaaccctcagtacctctgaatgtgattttatttggaataaggtcattgcaaaggtaattagttaagaagaggtcatactggaagacggtgggccctgaatccaataagacaggtgtccttataagaacaggagaagaaacacacagagacacacaaggagaagcagagacagagattggagtgacacatctacaaactaagggacaccaaaaattgctggcgaacaccagaagctagaagaggcatggaagcttctctcctacaggtttcagagagcccatgtccctgttgacatgataactgtggacttccagccttcagaactgtgaaagaataaatttctgttcctttaagacaccacgtttgtggtcatttgttaaggcagctcttaggaagcttatacataggctaactcacacaccagagttctttgttaactctttaagcaacaacttggctttttatctcttttcaggttttacattccttctacaatattaagctccttcttctcccctcactcacagcatgaagctttaggcttcatcctctggcttctccctctctctctctctcatatccttcccctacttctccatgttattatctttcataacttatctcatgcgttaccttctccaagaaaccttcccttatttctggccaagatgagcactgtgctgagctgttttccccaagcagggcacacatttctccgacacgtatctgtcttccccactagaacactagctcctgaggcacagtgtttctgtttctcatcactgtaccctcaggactgagctcactatcaggcacacagtgtttgttgcatagactacttttgttttgcattttcacactttcttcttcccatagtctagtctcgcctctccttacacgtcacttagtcatcagtttggtagtcagcaagtcattttagggtttccttccttggagaaaatccttccacatgtaaatctagcaaaaaccagctgatgcagcacttgggagccacagtccagctacaggaacgagggctagtcctcgggtttgccataattttaaccatcaactgtaaatcacagtgcacatttcattcagcttgatggtgtgtgacaaggccagaaggagaagcatttagtggatctaagcatgaataagaaaactctttccttcctaccaatacaatgaccaagagactcctcagtcctctgttactcacagagtatactgctcctctcacatagtgagaaagggagaactggactggatgggctaataaataaaataaagctttcatgttggcaatgaccaaagtaacaaatttaaacttggcaaaaagacagaaaccttttaatacctttaaaataaaaagatttttatttttagaaagcactttttaaatataaattaatatcaccttcattatatttttatttcagcttttattatttgaagtataacacttttaaaactgtacaagtagcatgggccaaatttctaaacatggtgatacaaacatattataattgcatctggaacagctttataaacatttttctattaaaagaaaagttttttttaaaaaggaggagcagagtcaactgttttataagaaatcatttatactgcatatccatgaattaaacaaatttatttttaatctttgctggtcgctggccagcccagctctgagtctttaagctgactggcttattcctgccaacatcaataaatgttccctggcacctttgccttccatcctataccccaaaccactttgctctgacctaccttaaaccctattttctgacttatttctgatatctgctcctgatcccttgaatttccttttccaggtccttctctggcacccgggtttaccacctctgagagacccactctccctatgtggctcactctgctgtgagtctgggcagacatgagaagaccaacccactcgtcccctgggaccctaggcttgctgcaggcgttcatcagcagggggtggttgtgcttattaaagccccaagaatttcaccaaagtgaggcattttcactaactcctaccttgactgttctgagaatagtacacatagcaggcactcaaatagatgtggagagagccaaataacttttttttcattaagaaacaaacatctataaagttacagaaaaaaacaaattctctggctggcttttgataatcagtatgagttgcacgggtgaagcaaatttaaacaaggttggagaacgcctctgtgaaggaccttcttccccacaatcattcttcaacaggaaaaaatgcaagagacagcacacggggctattctagcacagtctcttccttcaagagagctctcatctgttacgttagcaaaaatatagtttctttagtaaatggtctgggtggggggtgatgggcaggggaactatgtgttttccatttatgttttcatctttttttttccttttgggatcctacatttcccctcttgctcgtttttgctttcattgaagaattcccaaaagtaagttttccattttacattctgtattagtttcctaatgcttatataacaaattaccacaaatggaatggcttaaaacaacagaaacttatcctattttaattctggaagcctgaagtccaaaataagtcttctggggctagcagggaggcatctgcagggctggctctctctgtaggatccaggtgaaaatccattcttagcctctcccagcttccagtggctgctggtattccctggctcctgtctgcgtcactccaatttctgttccatcctcacactgtcttctcttctgtagccaaatcttttcctgcttccctcttacaaaggcccttgggatttcacttagggcccgcccagataattcaggataatttctctatctcaaaatcctcaacataattgcatctgaaaaatttcttttgcggatgataaggtgacatgcacaggttccagagattaggacatggatatctttagaggtcactattcagcctcccacagcctcatttccgtagaagtgttgcctttccaagattgcctgcctgcctgcctgagccccacacacaagacgttacaccctttccctgcagtcgctgctctgatatacccaggcttctttttcagttttgtttctttttttttttgagatggagtctcgctctgtcgcccaggctggagtgcagtggcacgatcttggctcactgcaagctccacctcccaggttcatgccattctcctgcctcagcctcccaagtagctgggactacaggcacctgccaccacgcccagctaatttttttgtattttttttttttttttttttttttagtagagactaggtttcgccgtgttagccaggatggtcttgatctcctgacctcgtgatccacccgtcttggcctcctaaagtgctgggattacaggcgtgagccacggcgcctggcctttttcagtatttttgaatttaggattgactttctctcttgatggtggatttcagctcaattacatcttctcttttccatgcaatttttctaaaaactcagctctccacaaagacttgagaaggaaacttgagaaatctcttttccagaagttagtgtttacctttctacttatggagagtttaaaatttgtagtgttctctgtcttcctctcatgccaaaaacatggagttttatgattttatctgttctgttcttattgatcttgcatagatttttagaggattggaataatttggctttcataattaaaaagcataaatcctgtatgaaacaggcaaataaacagtactccaacttggggaagagctaatacttacacacacacacacacacacacacacacacacgcacacgcacacacacacacacacacagctttaaagtgttaataattttacataatcgctgacactttgaatagttattcatagaaataacaattaattaaaagatacagctttattgaattccagaactgggatagagcacaagaaccagagctatcaaacatctagtaaatatctctgcctcactatagcagaggagccacgaggttatttcttctgcaagtatctaccccacaacaccccagaatcctcaaaagtaaaaaactgaatgaaattaatgtcattatgttgaatgtagcacttttggtacaatgctttatatagccaatataaataaacactgtcaatgtctttgcctcctattctctgcctgtaaaacagcaatcataatatttaagtaagaaccatctgagaaatgttatgatgaattagccagagtctgtaagttactttgcagtgagggcttaagtatgatcatttaggtttgatgtatggagtgagaaggtagaagctttagtgacagactgtagtcacataaattaatatattaatatttaacaaagaaatgggagatgaggaattgggatgtctgcatcttctacactgtaagtgcaaggactgactttgagctcctgtagttatataattgtccttatttgttaacttcatctgtccccaattaacaggtaaaaaacatattcaaagcagtaaatggtgtcagcggttattttgaaggtagggacatgcacactaatattccgtaggccactcttgtgctcaactaggtcacagaatggccatctctttaaatcaaactttgcagctactgtccaaatttggacgagcatcaccaaaaattcactatccaaggttcagcatggattatataccaagtgtctgattggccctgccttaaaaggaaacattccattttcttagtgtccattttatctgctacaaaaatgattactttataaatgctataaaaaactcaatacatagcatttgtactaggagacaggcacttactatactaataaatctcaacacctttcctggtactaccccctctgcctagagtgattcctctcatatttacactaacctttccaatgcctagatcagtggtcaccaccttggagcccttctacaccttgtaaatcagatataatcaccctatgcttagaaatctattatttttaaatacctatgtttttgtacccgcccatactgcttatgacatacatatatgatggcaacatagaagtatatttaagagcccagcttttagtttatactatgtaccaagttggactctaccatttatttgtagttaacaccctgactggcagatcattcttaagactcagtttcttcaaggaagagaaagatagtaatagttaacctcataagtttgtcagaagaattaaatacatgaaatactaaatctggcaaacaggcaataaacaaacactagctaatatttttattcctgctacaagtatcctgctttgagtgtaaactctttgtattggagattacagattatgtatttggtgaccccacagcatctaggccaatgtcttgtacataataggtattcagaaggcattttaaaaatcaaactaagtaaaaaattctaaacaaacaatatttgttgggcttttctactgtgaagacacagtgagaaatgaaaaaaaaaaaattcctgacctttaggtcattaaatgcttaatctagttaaaaagcttagtctagctaaggggtagtctttaaatgcttagtctggttatatacacacgtacacatatatacaaacaaatatatacaccaacatctacacacacacacaccatatacacacacacatatctatgtatacagagagagagagagagatgtattttcctgcccacactcacaaaactaagtgaaaagaaccaaggaaccagctcaaaagggaatgcagacttggcaaacacaattataagtaaaacttaaaacatactttttctttttttccccaaatattcctccttttgtaactcctcttcttactcctactcaaatctttgtttccatggcaatatttctaccttgaagttccaccactgaaatgtctacaactatgtctactgctctctcttttaaattgctactagaaaattcaatcctccagtccatgatgtagatggactacataaatgcctactaacttaaggcacatttctcacctcatcccccagtactatacaagatattttttttacacagaactattttaggccgatttttatacttgataaaaaataaactccaagaatttcagactctgtgatgtgagctagatataacccaaactcattgagactcaagctctttacccaatacaaagacaacatttagagagctacttaacaatcaaaactagaaaataagaaaggatgccagtaacagaattatccaacaaggacttatttcttaccacctgatcttgagtttggctagacactggatttctcctgccagaaccccagaagtgttaagagaaccctaactgctattgtgaggtttgaactgatgaactctaaaccgtgctgctattagactctttaatgttgctcggtttactcttaattcctgttttgagttgtgctgccaaagttctgaagacctgaaacatgtcattacctctgaattgagttagtttgactactctgaaaaccagtctgattctggagaatccctgccaaatgccacaagctaaacgggtaccctggaatcaaactgttggtactaactcaaagagcacatctgctcctgagcttctgggaacaaatgggagaacttgtaactacccaggagcactgtccacatccacagaggcccccagatacttaaagattatttttaggaaatcttgaagttcacagaaaattcattgatttagttcagctgttccttcaagaattctaacaagggagctcctaaagtgtcacccaggatttaccatgaaaattcctagaatggttatccataagttgaatcaatgccctagaaaatttgctaaccccatgacagaggagttctgactcctataacaaaacctaacagtaactaatccaaaacaactgccttttatgatgctgctagactgcacagagacaacctggattttctccattaatcctgctgctgatcttgatacaggaaagaacactgtctttctctaaatcctaaatctagaatagatagaaaacaaaatgaatccacagtaattttttttaaaaaaaggtctaaattccctcaacaattaagtccaaattaaaattggctacatcactgtacagtttgccctaacgggtaaataatgctgtttattgttgcatttcactcgtctccaattcccaactatatcattaacattgcacgccatattgttgtgaatcaatcctctaatttcatttgaatgcatccagaaatctggatattgtaatcaatatattacaaaaagcaacataacttcataaggatttgcaacatgttcattcctcatgtgaggtgttctagtacatcagggttgccctgcaacccacttggagattatatccttagattctgaacccttaactgagaaatatcgaagcttattgctactattatttctttattataaatttttctcccctgaattttctcaacttatagaaaggaagtccggccagcagcattagttaccccgcattccactgagagaatttgctgtcgggacatccactccctctccgttcgggtgctctactgttagcatcttttctccttcaaattcagaaagatgcaaactagcttgaaaagcctgttctaaacaatactgcacagcagtgccaatactatgagatgtaactggtgcttgtgcatgcaaattaatttaagtataaacatacttcatgtataaattacatgaatatgcacaaatattacacataaatatttgtattgtgtgtatataagtttatatctgcataaacatacacatatgtataactatgtacatatatgcctatgtgtgtgaagcttggttgtgtcttcatacatttttttttaatgtatgtaagctaagtggagataagtcatcttatgggccaggtacaaggtcttgctcaagaaaataccagcccagtatttaaaaaatgatttaactgcttagtcaagtctttctccaaaatttaaaaactaaaatgtgattgtaacatacaaactttcaaaatcccctttctctattttccaaatctgaaacacttagcaaatccatccctcctgtccacagaattctctatccaaacttgccaaactttttgaggctcttagttcccccattcccatccctaggcaccctttcaaagttaatttttctcccatttggcaacagttctctgtcctttcctaaaagttacgtcaaacacaatggatttcctgcttttcacttctaccccctccctcaagagtcatctctctctctcctgttggggttcagaaaataataccccaaagtatggctctttgacttgctgagtattttgaactaaagcagcaagcctcagaaccaagaggtctttctgccctgctcccactaccaggctcttacccctctgccttctccagaagcacagcgaggggctttctttgaggttcccttatctgaggaaaagcagttcctccagaattaatgcaacatcttgggtctccttctaaaatctcatcaaacagagattaactgataggaaaggagagagagcagacaccacacccataactcagactttgtcccaagctacttactgtctgtttttcaggcccactcgtctcccctaaaaatcattcactcttcctctaaaattgcctacatccccccacttccctcccttctatgaagagggtatttaaacttcaaccatctggcccctcttgatgtttcatacttggtgtgattcctgtgtactgacccataatcaacttgtacactttttctcctgttaatctgtttactgtcagattctttcatgtactcaagttgctgaactttcagaaggtggaagtagagttcctttcacccttacactcccattctccagattctatataacaagggcctacaacacaaaagctggcagaaagaagaggctataaatacttatgtattaatattttttcttgtcttgtgcctaactcaatattttttcattatctgtgtatactggaaagtatactcctaagctttgagttcacataggcacttacatattccacaacttaatctccccagctgaaaattcagttgtaagaatcaaatgtaatggtaaaatatgcaataatacatattaatgcaaaaatgtaataatacatgtgtatatatgagatatatacaagatatataatacatgttaaatctaataatacatgttgatagtaattcaagtatgttaagaagtgcctcccctggggaataaataacacacattttaaaacccatgcttaacccatatctttctagatacgtgtcttttgcagttatctgcagctaacccctatacagtgccctgaggatggaggaagtgtcctcttgatttgttaaagtttaaaagaaatactacaccactattatcacacctagagattacaaaggaaagaggagctttagaatctgtgggctttctattatgtggttgcagaatcaataattagcattatgttttttaattgtacacaatcttttaattaaaaaaagtcatgcttttcacagtatgaagaatcaggattttctactattgcatacaattgttttggtatctagtttgcatttaactgaattaatttattgtctagtttcaatgaaactattttctatttacactgatattaccttcaaggagtaaaaccttcatattttctttacactgaaaattactttattcttgccctttgccttaaacattttacatatgaattgcagaccaaagtggcgtttgctttttcccccttcagttgtctatgttagacattctacagatactcctggtcataaacagatcattcctgtatttcaggtacagcacaggactgaagatgagcttaacatctcagcacccatggaaaagactggcaaaatcaagaagctgcacagccaaagagaaattaggaatttgattttggactggaggaacagctgagggagaacagtgtgacatgaatcttatgtgtaagattttatacaatttgtttattaattttgttttgttgggggtggggaggtataatctgtctcttcttacaaccaggagagaggcagattcctctgatcatccatgtcagagataatggaatgagaattctctgtacactgtatcccagaaacacagcatctctgacttcttgtcaggctcaataaattaaaagacagtgaacactgactgggagcacactttctgcactgtcctaggtattgtgcaaggcttcagctaatccaaaaccctacattcaaacttgtaaaaaccagacatttcttttcagataatcagaaaaatacatgccagaaaaatcatgcactagggctcctgattggccaggttagcacagactgaatattaacccccaggcctcctctgtagggtggctttatgtggtactcagccaggcacagcagccctgccatcagaccttccgccacaaattcgaaatccagcatctcaggttcactccaatagtgactcttattctgtacaaaagatgtggaatctttggagatgtcatttaaatgccaattttcatgcttcctcttcaaagttatggcacttataacatcaatattttaaacagttcaagtattttttttatcttctaaatgagtcattcactctcttagcagagaagaggtaaaataaaatgtcaatgactaaaatgtgaactactgcttcaaagatagagtgagtacatttctcatgattcaatggtaattggcttggaacttggaaatacaatgctgcctatgacaatggaaattcactggactctgcaggaattcaaaggctgctggagaaagtgtcccagtattacccatatctcacttactatacttcttataactcaatttcctcccaactctcacggagttttaaaggaatcatttgtgccactcagaatgtatatgtatctactaagcaatttcagctactaaaaatttctcagacgtctccaggctgcagcaccccctggctcctctaacaggctgtgcccatcagacagggcagacattctgagggtcagggcagtcactttttaattgttccattccagaagggtgggtcctgtgatttagaaagcagcaccttagaaatcacagtccccagaagcccaatgaaccagggaccttattaccctcatctgtgtcagctgttctcagattgctgttaagcatgagaaccacctggggaatctggtgaacacccagggtgtttttcttcttcccacagatcctgatttggtaggtctggcgtgggaacccaggatattttacagtcatagtctgcagactacactttgaagatagttgtattccatacaccaggcttccgagttgtgaggcagacatatctcagacactgatcatcaataccatgcaggcacacctgcattttctggctatccactggaaataattatcaaatgatactacatgtgggtaaaacatgaatttttcacttttctcttgggaaaaatgatgatcacaatacttttattccatcttctcaatgaactgacacaaacatcatatgaaaaggcaaaagaaagcactctgaagcatgcaaagcatatacacaggtgtaaagtaggactcaggtagagcatggccaactctttaaattacaaagtacataacgaagtatattatcctaaaatatgaattatacaaggcattttaagtacaggtagatttcattttattgtgctttgctttattgtgcttcacatatactgcctttttaacaaattttaggtttagggcaaccctgcatttagaaatctattggtgccacttttccaacagcatgtgctcactttgtgtctctgtcttacattttggtttagtaattctcccaatatttcaaatgttttcattattatatttgttatggcgagttgtgatcagtgatctttgatgtaactacagtgattttttggggtgccatgaaccctgcccatagaagactatgaacttaataaatgtgtgtgttttgactgccccacccaccagccattcccctatctctttccatctcctccagccccctattccctgagacattaagtattgaaattaggccaagtaacaaccctacaatggctataagtgttcaactgagaggaagggttccatgtctctcactttaaatagaaagctagaaatgactaagtttggtgagaaaggcatgttgaaagccaaaacaggctgaaacctaggcctcttaaaccaaatagccacactgtgaatgaaaaggtaaagttcctgaaagaaattaaaagtgctactccagtgaatatacaaataagaaagtgaaacaactttattgctgatatggagtaagtttgagtggtctcgacaggtgatcaaaccagccacaacattcccttgagccaaggcctaatccagagcaagtctccaactttcttccattctatgaggctgagagagatgataaggctactgaagaaaagtctgaagctagctctagagcttggttcatgaggtttaaggacagaaactgtctctgtaacataataatacaagataaagcaacagctgatgtaaaagctgtggcaagttatctggaagatttagttaagatcattgatgaagttgagaatatacattaaacaacagactttcagtgtatacagaacaaccttgtattggaaaaagatggcatctaggacttgcatagcaagagaggagtcaatgcctggcttcaaagcacaggctgactctcttgttacaggctaatgtagctggtgactctaaattgaagccagtgcacatttacaactctgaaaatcctagggtccttaagaatgatgctaaatctactgtctgctctagaaatggaacaacaaagcctggatgacagtacatctgttaacagcatgatttacggagtattttaagctcactattaagacctactattcagaacacaagattccttgcaaaatattactttgacaatgtacctagtcacccaaaagcactaacagaggtgtacaaggagattaatattattttcatatttgctaacacatccattctgcagcccgtggataagtagtcattttgattttcaattattattattaaagaaatatatttcatacagttatagctgccatagataatgattactttgatggacgtacacaaagtaaattgataactttctggcaaggattcactattctagacaccctaagaacatcctgtgattcatgggaggaggtcaaagtatcaacattaacacgagtttggaataagttgatttcacccacatggatgacttggaggtgtttaagacttcagcggaggaaggaactgcagatgtggtggaaatagcaagagaactagaactagaagtaaagcttgaagacatgatggaattgcttcaatctcagataaaattttcacagatgaggagtcgctttttccagataagcaaatggtttctttagatggaatctactccaggtaaagatgctgtcgacattgttgaaacaacaacaaaagatttagaatactttatgaacgtagttgagcatgcagaggcagggtttgagaggactgactccaatcatgaaagcagttccaccgtgggtaaaacactatcgaatagcattgcatgctacagagaaatcttttatgaaagaagagtcaactgatgcagtaaacttcattgtttcattttaggaaattgccacagccaccccaacctcagcaaccaccaccttgatcagtcagtggccatcaacacacaaggcagaccctccagaagcaaaaagatgaagatttgctgaaagtccagatgatcgttagcattttttagcaataaagtcctgtaaaattaaggtatatacattgtttttagatgtaatggtcttgcacacttaatagaatacagtagagcataaacataagtttaatatgtactaggaaacaaaaaaaaattgtgtgacttgcttaattgcaatatttgctttattgtggtgctctggaaccaactctgcaatatctctgaggtgtgtctgtatcttcaggatatttcttcaatgctccttttctctctctctcttttttttttttttaacataaataaaggagaaccaaaggtagaacttacttttcagaactaatcaaactatatcactctaacacatggtttttagacacagaataaatggttcggttttaagcacacgtagtttctctgcgtgaattactcaagtaattgtgtctctgcagatcagggtacattcagtgcatatctgtagaattgtatcatttcagtaaaatggagagtctgcataatcacattcaccccattttagaagacaactgagaacatgacagaacagcactcaactccgtgtctcctttgaaaaaaaaaaaaaagtgccaagttatcccatgaattcttcccaaagtgttaacatggaattgaaataaagtcatacgaaatagcataaaaaatgtgaaagggtgtcatgtatgaaactcaaatgtcttaccacttaaaatataacacagcttttatgtgaacaaatacaataattcccattttatctaaatgaactctagaacagttgaacaggcttgaaaatccagtaccacagaaagaagtaaggagttgcaccattgagaaggtgagaaagggaagaagactaagcagccagctaaaagtgggagagcccagaggcttctccccttgatcactcctctcctccccaaatcaatactaactcaggattcttattttatattacaagtaacagttttcttgtacaaagcaatgaggaacgtaccctctcttactggaaaacatcagctgtggggcagtaccttggtacaggataagccccattcccatccgtgttttccacactatctccatccagcccataacaccctttcatcttttacctcttctccaaacctttactaacaagagtcagctctgtttccacctctaacattaggccagaacttccttatactaatattaacatctacctctttattttattttttattttttgagatcgagtcttgctctgttgcccaggctggagtgcagtggcgcgatctcggctcactgcaacctccacctcctggagttcaagcaattctcctgcctcagcttcctgagtagctgggactacaggtgcgtgccaccacacccggctaaattttttttttttttttgtatttttagtaaagacagggtttcaccgttttagccaggatggtcttgatctcctgacctcgtgatccgcctgcctcggcctcccaaagtgctgggatctctttttttttttttcagacagagtctcactctgtcaccaggctggagtgcagtggcatgatctcggctcactgcaacctccgcctcccgggttcaagtgattctcctgcctcagcctcttgagtagctgagattacaggcacacaccaccacacccagctaatttttgtatttttagtagagacggggttcccccatgttggccaggatggtctttatctcttgacctcatgatctgcctgcctcagcctcccacaatgctgggattacaggcgtgagccaccacacctggccaacatctatctcttaagtccacgatgatttctggggatcttgtccatccacagtttttactgaaaaccgtaaactatatacaggcacttgaaatatgcaggcagttaaaccctttagctaaaggttaagtgttagaagttctaggcgataatctcacaatggttacaattatctctgagatttaagcaagtgatcattatgttttcatgtgatacatggtgaccacaatactctattccatcttctcaatgaattgagaaaataccaaataataacacacaagtaagtgctctcaattatgcaaggggtatatacaaatggaaagcagtacttgttgctatttttctttataccacaaacactgaataagtcagaggaagtacatttccaacactaaggaaatgcaagcctaaattaaccaaatcagtttctatctactaatcaatagatggcattatttcaatatgcatttttcatgaaacatgataaaataatgagaataattcttcaagacctgcaaaaatcaatgatttcccatgactgtcttacctaacatgcttttggcatttaagttgccactttgtatcacaaaaaaagcaacgttaaacgtagctgattctgacactgagaagctgggtgaccctcaagttccttaaccattattaattacagctgtcctcattggtaaagtggcaatgatcaccacaagattactagggtgtcagataatataagtgcccaagcacataaaagcattcataaatagtaccccccatagacattcttattgaaaattcaatattaggatcactctccaagtaaactgtggggctccttcaagtcagattcttgcctaccttcatccctcataactcacaccattttgtgactaaaaatgaatgtgtttgaaatcaaactgagaagagaattaatccacatgataaaatttaagctcaattaagtgctaaattgggtgggtagtgattgtaagtagattcaataaaagtgcaaatacaagagagatcaatggaaatgctttctggaagagggattttgtgctgggacttgcaagacaactatgactgaaataaactaaaggaacagaggagggtgcttcaggttgtagtcactgctattagctaagaaatattacatatattaacttctttactttcccagaaactccatgaggcagatattataatccccattttacagataaagaaactgagacagattaagtagcttgcccaggttacacaaagtgtcagagtaggacataaatacagaaaatttggcttcaaaatccacacatcgtatcgcatagtcatcaaaataagatctactgatcagaaaagagagtacatctcactgtatcagctgcaaacaacagaatcccctccgtatagtttaagtggatagagacactttttcaaatatcagctcagaaatctcagtacatcagagaatcagccaggaacaacatgggtggggcaaagcgcaagcacactaggtctgctccagtaaaaataccactgctgccacctccaagtgtgtggtgccagaaatgtcacagcctctgccacaacgccgttaagtcctaaccattgcacttgcccaaacagctgttctgtgtgcaggcagccttacattgctcccttctgcatcccttttatgcatggtacagcagatgggcaacatgtccatatcctagcagcaagagagtctaggaaatgcagatgaaaaaataaagattctatcttgggaggactggaatcacaacacaagaaagtaacaacatgtcaacatgataaataaaagatgtcaggcaatcacaaaaggccactacacaccctgatcacaagcaggctgaaaggttctgagaaataaagtcagctatataaagtagggtcagattatataggtgcaactgcatttgaaaacaatttactctgtccaataaaggccataggtctcttaacaatagcaagacattgtttagggaataatgtaaagatgattggttcaaaaattgcaagtgccagaaacttgaattttttccccaccatttagaaatgttatatcataaaagcatagtcatatgcatcatttttttaaaaaacgcaaatatctattaaataaactctattaaataaactggccacatcatatgtcatacattatttttgcctcttacagttttcttatatttcttcaaggatcattttctaagacaatggagacactgaatgctaataatgttttatgtttttggaaacaatttgaattaaaatactacatattaactagaaaagttttttattcaatttgggaaattgaaagttttttaaaaaccatcattcatttaactgtcacaaccatatatgtttctgaataacgtttgaaatgctttctacagtaacaattgtttttagtagttcatgtttaaggaaagacacacatgataagacatagtatttctgagtaaaatccagaatacagaattaaacacatctattttaaaatggcaattattggtaaaaggcaagtatataacggcacaatatcaatgttttgattttacagtataaacagactgacagtagcaattttttcctgataataaagtaataaagcacagcattactttggagcatcattaatgttaaatcttttttcaacatctatgtgaataactggaaacattttttttttttttttttttttgagacggagtttcgctccttgcccaggctggagtgcaatggcgcgatctcggctcacaacatccttcgggttcaagcaattctcctacctcagactcctgagtagctaggattacaggcatgtgccaccatgtctcgctaattttttgtatttttagtagagatggtgtttctccatgttggtcaggctggtctcaaactcccaacctcaggtgatccacccgcctcggcctcccaaagtgctggcattacaggcatgagccactgccctagccacatattttaattttcaaatctgaaatattttacatcacaaaactcaggagaaatgcagattaacaacaaatgcaatggcagttactttttgattacttgacatattgtgtactatgctaagtattatgtatacaatttcacttattcttgctgaattcatacattttattatacctgaatttaaacagaaaaatgttttacatagctctcagacacatttctacagctcaaaaacactgcatagaaatgtgaatatacccaagggcaataatccaaagaagattaaggcaaaatctctatttatatatatttatgtcagtatagaagtcagaagctactatggcaaataaaatttgagaggagaagagcaaatttagcatagacatgcaatgtcaatggaaagacataactgtctctacatctatcttctaacttcataaaacgacatccattaagggttttgatgatgatgtctatgaaaataatgttattttgcaaaattgctgatggtgaaagaatgttaaattttcaacagtatgtaagttttcatgagtataatgctgattggggaaaaatataatcttgaaaatatatctatgatcagaaccaacagcccctgcactgtttatagaaaatgcttcacctcaaatattttgctttttttttttttaccatttacaatacattgactatttttaagtagtctgaatactcatcttttatatgaaatttataacaaaacttcaagcaacccagaaggctcattcgactaccttgttagagctgacttagctaagggaggctcaaggttttaaatgcacagttgcattaatttatttcaagttaaaaataaagtgtgtaaccacagttaaaaaaaaaaagaaaagaaattccttctttatctgaattttaaagaaacaagactgccttatttagcagataaaggctttaaagagtgaataatctcaattattatcttcatgaatttactgaaaaagatataattagttatgacaagaatatggcaatgaaactggagtttgagagttaaaatcagtcatagagactatgagtcaccttgaacattatagttcatttaagatagatgaaaagaagttcatatttccttatgacactttcttcgcattttcttaagacaacagaaaggactgaccaatgacactgaacacagtttccttcttctgtagccacagatatgatcacctagtaagacatgaaacagatcaaaattgtcaccaggtcgaatgccttcagagcacagcatttttctcagtgatgattctctgacataatttgtaaagaaaacaaaacaaaaaaaacctgttgacatctttattgttacattggtttctcaaaacactaggggagttttctagaaggtgaatctaatatgtggtgtcagttctgctcaatctattgatttcaaaaattgatagacacacagtgaaatagaattttgcccatgtggtgaccagggattatgtttgcccattaagtaaatacaaacattattttatataaaacaaacatatcttatgtagtaaaatattttttaatcctatgaaattaaggtgaaagagtgattcaaaagagttcacatttactgtaggatactgcataaaaggctctgtgactctaggcaaatttgcatttactggggtactgaacaaaaacttttcacaagatctatattagattcttcttacacatcaatatattagtaggaattatgtctggtatcagatcatgtccaatgtgataactagttacaatgatcaaaaccaagttacaaagacaaataccctgcaataatgaaaagactgattcacaagacatggactacagttcagtgcctgttacttacttgttgtgtgatcttacatgcatatcatctctgcaactttatttactaataaaaacaatattacatctactcaaaggattactaaggcagacaagcacatgaaactattatgttctcttaatgaattgacatccttattatgagatgctcaattttatctctggttatattattgttctgaggcctactttgatatgaatacagggcaccaacattttggttttgctgttatttagtgtttgcataacgtatctttttctatcctttcactttttatcttaaaacaatgttcaccacagaattattatgttccaggaagaaagttttctaaactattaatagcttttatttcaagatgtgatcatgtcttctaatttctcttgataggtttttttatagatatttaaatttttctaaaataaaatgttatcagacataagaattccagtttctgatctgaggacaggccttgtacacaggcaatcaacaggactggcatggctaaacacgaatagtctcacctttcatacgaaacttcttcctctagagttacaagaaggatgctgtcaaagccaaaattcatctaagttttcattgtaagtataaggaaggccatatactcacacatggttgctgctataacaaacagatttcttaaaaatcactgcccctttgaactatacaaagcaatctgctcaagtctccccttagccagtttagtaatccatatttgctctcctatacagttataaatcctaagccctctggttcaaaaaatgtttttttttaaattcttaattgtggtaaagaacatataacataaaatttaccctcttaaccatttttaagtgtacaactcagtagtgttaactatattcacaacgctgtataacagatgtctagagcttttttcatcttacaaaactgaaactctatactcacaggacaactccctatttccctctcccccaacacctggcaacttcattctactgtcgaagattttgactactctagattctatcctttgattactctagaatgtaccatcttgctatctgtactctgttccttttgacttttcttcttttagataaattgaggggtttttttttgcagtgtttctggttcatctccactattggtcctgacaactgtatctggttgttttgtgtgggtggctgctctagaatttacaacataaggctttatcacaagttatcacttacgacttactgacctaccttcaaataataccataccacttcacaagtggtgggagaactctacctatacttccttccataaccctgtcctgtgctgtcgttactactcattttcattcaatatgtcacgaactccaccatgcattgttatatttgctttcagcagtcaactgtcttttaaaaagatttttaaattcttttatattgacccatatgtttaccattactcatttcctgtataaatctaaattcctacctagtatccgtttctttctgcctgcaatttctttcttctttcctgactgatttcagataagaagactgatttatcttccttcatgtgtaaggtgtattttttgccccctggctgcttttaagactatgtcctttattacttgtttctagcaatttgattattctgtgttttagtgccatttattctgcttggggctcattaaacttcctgggatttgtgagtttatagtttccatcccatctgaaaaatgttcagctttttttcttcaaatatttttttctgatctccctcttcttgaaagtccaattgtaggtatgataagcaacttgctattgttccacagctgcttactgaagctctgtttttatcttaagcctctatttcttttctctctgtgctttgtgctttattttggataggtttttattatttatttatttatttatttatttatttatttatttattttgagacagatgcagtcttgctttgtcatccagactgtagagcagtggcacgatctcaacttattgcaccctccacctcccgggctcaagtgagtctcctgcctcagcctcttgagtagctgggattataggcatgagccacaacgcctggctaatttttgtatttttttattttttagtagagacagggttttgccatgttggccaagctggtctcgaactcctgacctcaagtgacccacatacctcggcctcccaaagtgctgggattacaggcatgagccatcgtgcccggcctactttggatagtttttattgctacgtattcagacattgatcttttcttctgcagtatctattaatgtcatccactgtatttttaaaattttaaatacagtatgatatggtttggaagtttttttccccttcaaatctcatgttgaaatgcgacctccaatgttagaggtgggcctagggagaggtgtttgggtcatgggggcggatccctcattaatggcttggtgttgtcttcatggtaatgaatgcgttctcactctgagttcacaagttgttatcctggcaccagctccctctcaccacatgatgcacgagctcccactttgctttctgccatgatttatttatttatttatttttgagacagagtctcgtgttgctcaggctggcgtgcagtgatgggatcttggcttactgcaacctccacctcccgagctcaagcaatcctcccatctcaacctccggagtagctgggactacaggcatgtgtcaccatgcctggctaatttttgtattttttgtagaaatggggtttcaccacattgtccaggttagtcttgaactcctgcgctcaagtgatccacctcccttgggatcacaggcgtgagcacttggcctcaggtatttctttacagcaatgcaaaaacagacatacatggtgtatgtttcatctgtttaattttttatctttttgtaccttccatttctcttctcatcattttcatgttttccttcacatttgtgagcatataagatacaaaatagatgttttaagatctttgccaattatttgtcatttctggatgtgtttctattgattcatttttaaaacttggttataagttctattttcctgcttctttgtacatctggtaattttgatcggatgccagacattgtgatttttacatcattcagcactagatcgtgtattctttggagtgcatttttgttctggtatacagctgagtgacttgcagatcagttcggtcctttcaatgcttgtttctaaggcttgtcagggtaggtccagagcagtctattccaggactcagggccactaagctgtgacccttccaagccctcttcccaatgcctcacatatgaagaggtctctccaccctgatttctgtcagctttatgtgagctccaagaattgttcaacctactgctgtatggccgacctttccttgccttcctccaatacacaggaagataagtactcaccaaaccctttagtgggcccctctggagatctccagagctctctctttgtgcaattccctcctctacagtattcttctcacaaactagttgtcctaacttctccaaataccaaaccctgtctgcttagctcagtgagacggcgaggccctgtttgggttcttcctccctgctttgccgcccggaagttacctccaagcagtaagctgaggccactgtagagttcatcacgttttctgctctcctctcaaggaccatcgcttgttgtccaatatgtgaaaaaacatctcttatttcatctgagtttctagttgttcatggtgggagtcaattcccacaagagttaatcctttgtggtcagaagcaaaactcctctaaaggttaaacaggatattttggccaggcgcagtggctcaggcctataatcccaaccctttgggaggcaaaggcaggtggatcacgaggtcagaagatcgagaccatcctggtcaacatggtgaaaccccgtctctactaaaaatacaaaaattagccaggcatggtggcatgtacttataatcccagttacttgggaggctgaggcaggagaatcgcttgaacccgggaggtggagcttgcagtgagctgagatcgtgccactgtactccagcctggcgacagagcgagactccgtctcaaaaaaaaataaataaataaaaaaggatattttttgtgatgcactttataaactctgaaccggtatgcaaacattagctcaagaaaacacatctacagagaaaacacgcttgatggtccagatttttttaaaaaaattcttccacaaagacaaggagacaatgcagaccatgatcttgtagaagctgaaatattctggaaaggttaatttgcctgaaatcaaaatgctcaaatcactcagagtatttaatttccttaagaaatattcctttttacaaagcactgaccctataaaaatgcaaataactctaggaaagggcactttacattctcttcaactaatgagactgtggttagaactggtcatctgttggtaccttgaaccattacagcaccatcagagcgcagggacatctggattgtgggtggcaggagaattaagttgaaagagaaagtacattgctaaagggaagaagggcagaattctcaacttcatagctttgcccagggcaggccctgagggaaaggatttgtctgcctgctatatttcccttgggtactatctgtaattactatcacagctcattgattttcaattccttgtattaatatatttattggccattctgacattattaaaatcagtctaactctgcatctttagtggaggatacctcttcttaaaataggagttttgcaagagcagatatttctttccgcttaaaaaaaaaaatggtcttctcacattagccataacacagcaactgcaaatgtttttctttgaagccaggtagtgacatgcaaagatttcactacagatcaaaagatctcaagcagcaggtcatcagagaatattaaatgataagcaaactcgtatttccaagataattctaccaatttagtcaaacgctggcccctgttccacagcaggagagggaataatgagcccctggttaaagggtaatgcaagtggcatttttaataatgcccttttttcacttctgataaagtcattaaagtaacactgtcttactacgcctttacgcacagatgtacactagatcgttagtgtaaaattaaataggtttactgaggaaaaaagttaggctaattgttgggttttttccccctaatgctactgaattttaatgtaatttatttcctgcgttaagtaaacattccatagcacatttccaggttcagctacaatacctgcacccgtctatatttctttattaagcctaacgactggagtctttttcaaaaaagcacccgtctccaaatcctctcaattccagtgtggcaaacagcctctcacttacaacaaatagcacatgaatgaatcaccacttattgagccctgccgattcataagctcctgtgctgagatgatgaggaataacaagaaacataaagcataagctctgctcttaaggaagttacattacagctgacttcatgatgctagtcagctcttggtgatataggaatagcttcaacaccttgttattaatgtcctgcagaatggtttctaagagttactgcaagctgcctctagggaaaagactgagtctcccttatcctcttttgttctgcctctaaaatgagggagtgcataggaatctctggtctggccaaggtggatatttcctggtagttaaggcatggagtattgacgtgattctatacttgtctgcggcaatgcctgcaccctttctagctacatggctatggcaaagaggcatcaggctcgcttccccaagggtaacagaaaggaatctgtcttccactcaattactgactgcttagagcacttaaaatgagcaaaacacccaatctctttccctgtttctgccgcactattgccgctcttctctgccggcccacggatcagaactgtacctggttctacaggagagaagagaggcaggataaccaatggcttcaacacccttgcagttagtgtagacactcaggtcagctccttccccgcggcagattcctcagacttaggaaataaacagtgagggtgactaagaaatgttgctttcaggtctccctctgagtcctctgcacctatgtagttttcaaaaatatttttatttagagagctcatcttttctttttaaaacattttaatttaaagaatttcaaatacacaaaattaggcagaataaactattttcatttttttggttccatgattctgtttttattctgttattgacattattttttgtgttccattatttcacataataaactctaatcagaatttgaaacattcttccagatatccttaaataaaaattcaaattaaaaaaagagttctaatttcagatctacctaccctatgtctacttggagaattatgaattaacatagatgttgaaatctctactagatacttcatgagaattgcagcaacataaacgaaagtaatagggcctttttctcctgtttttcttcaaaagaacactgactcagtacccaccaaaggcaggcaggctcctgtgaagatgggtggttaattccatcttccaggtgagtaggattaaaggagagagactaagcatgacccacacagctggtaccaggctgaataccatctgaactcaggtctttctcactttgaagtctgtgaatttacacttccatacacaggaagcttcactgcagtaagactcataaatgcataaacagaaaggctctgtctcaccccttgctcctcaccaggatcatagaatggcagacttcacctgggagagaagccctcatctccagcacccccactgtatggatgagggcatagaggcctggagatagaaaataacttcccaatgtcattccagctggtgaactgcagggccaggaataaaatcacatagtatatctctggggcagtatcctctatatactaccttatctctgggtgtgatagttctaatactcttcttgtttcagtcctttgcttagtaacatgttagaacatccaaaggctaacagcatttgggaagctcttgtaacagcaggacgcacgcaccaaagtcacagacaaagtcattcaagcactccttgctgtgcccctgaagcgtatcacaagagcacatgcccttcctagaggctgccagcagcatgtgctgtgttaccgacaagcaagaaaaccgaagtcacatttcaggtgactgcaataattatctacctagctttcacttaactaaaaatgcaagagtcagagaactccaaacagaaggcacacagaggtggtgcccatatgctaccacacctatccggttcacatggctacgagatgaggactcctgtcaccaatgagaatgcgtatttccaatatttacaattttgatttttatgttcacaataaccctatgacatagagcaggttgacaattatctattgactggttttatatttttcaccatgctaattataatgcccagacaagctgaataaataatgtattcaccatgtgccagaaactataagagatacaaaccagaaatataagaaatagtccttgtcctctaggagtttacactctgattgaagacacatgaccacatacacacagcataaatctcattaagagaatgaggcaaggcagccagaacttttcacagaagagatgcaggcctgttcccagtctgtctttaacctctgaaatgtgctcctcaggtcctgaattccttggaggggtggggagacatgcagagcccacctgacagcagaagacctaaaggactctttctaacacgcagcagagaacaactacatgcctttctggtgcactgaaacacaagggcatgtagagtagcatatctttaaaatgctgtgtgcagcctgagataaataccaacttttcttcaccaaaagattgagattagtatctatttcttaaagacagagtaccaaaactaggtttttcagagtgattatacattccaaccaatgtaccaccttcaggctttcttcaagctttctcattcattgttgtgacacagacaagtttctatcgctttttgttcactgttaactaacatgtctcatctttttcaaaagtccataatcagctgggcatggtggcacatgtctataaccccagctacttgagaggcttatgcaggaggatcacttgaacccaagactttgagtccaacccgggcaacatagcaagcaaaactctatgtcgtaaaaaatagataaataaatgcccataattatacatgtgagtgtaattatttattgaaatttcactaatgtgtttttcttacaaagaattaaacttcaaccagcctttaagtcataaatgaggaagtcatgaaatattccaaattctggctctccttatctaaaaatagttctaagattctgaacattatatggtatataacacccaacgcatcttctcaatgaaaaacccagcaaagtggccaaaaatgaaagtcaccaaaattctagactttgtttcaaacaagagttgatttaaagcattacaaaattgttaaaattattgtattctaatagagttaaatcattatacatttcattaaacactacaggctgattctcttgaagctttgctacaaaagagaatgaaattgtatctgtcatatatttaagaggtacacataaacccaaaggaaaaaaaaaagttctatttccctccaacatgcagaatctaaataagagttaaaataccaacatcagctccactcacaaggaggaaaatcgattttcatgaacaggcattaggcaatacctatgaacccacaacttttcatgtccctctctaaggacaaaaaaaatgctttctataaataatgtgacatggagttcttattcacactgcaaaactgctgggaatagtggcttttgttttttgtgcacctaaatatttcaggtagaccttaccttgaaaccaaaaaataaaggggaaagaactatatggatattgttaaagattaccaagactggtgacagcaacccacgatcctggctttgaccattggtctggggctaagtttctgactggtttgctatagtttttgccttcctccaacatgcacagtttgaacagattgttatttcaagttgaagaaattattgtgaaatgcagactgctttttcacttttttttcccatgagcagtgggaaaaggctatcctttctgaatgagacgccaggctctatatgagctgagcagaagtttattttactaaactcatgataatgcaactagattaagaaatgaattaagaaaacagaactctaaagaactaagacaaatcctccccatggttaggttaatcaataaaggttgaaactatctataaggtttggaaggtatatacaatttaacttagtgaatccagctagaaaatccagttgaacacatgactttttctgaaaggttttctatactgaaccaatgttagtaattgccacggtcttctccttcatgatcctctactgcctgtgtcttgggctgaatctgttatgaattggtcattatatcatgtataggactgtggagtcatgttattggttgacatactccacaaagttcatttcaaagctacaaaactcaacccagaacatagaggtgaaatgacatcctctaccacgatgaggctctgttcaaacacaggcttacactgaaaaacagaaattatattgagatgccacacagcctgctatgtgatgctcaggtatgcagaagttattgaagagaccctctaaatactaccatctggatccataaccttgaatgttctcattatgaaatccttttgggacattaatatcctaaccctttgagtgggatcccggatgtactcatccacattgatttttatactctaacagtgagattttattcacatttaaaatttcttttgaatgttcaagtacaaaacattgctaatttttagttatgattttttaataagagagacactgataaggtaaagattatatacgtatttatgtccttctatcagtcacctgtgctgcctcagtggtggtggtttaataaaataagtagccaacaggcactcagccacatgagcagcactttatctcttaaagttgccaatgctgcaaccaattatcctgcacttatgctcttaactaaaccagtgaagccataaatgttcattataaaatctatgtcattaaaaaaatatgcactcatagtccttgtattttcagtacccataaatgaattcattggtttggctatgtactgttaaataatctttctttcgcttttagaaatttttcaaattcagtgacctcatcaactatcccctagtactcctacagtaagaaagggcaagtacaaatgtcaaaagagaaacccatccaacaaacagtaacattctcatagcggtactttgtcatttcctgattagaatcaaccaaactatgatgacactgaggttatagtcccaccttattttttaatacttcctctttgctttggatttttattagcttttcaaatcatttaccaatttagatatagccatatggttctaataatgtcactatgccttccaaattttaggatactatcccttccaaggaaataatagttgaagttgcaaatgggtacagatcaaccacaatctcagatttttgtttgttttaacctgagagagaaaagcttaagcaagggaaaccgtagaagtgctctgcaaacctcaggatgctctgcagaagaatgccactctcatcaaaaggagtggggcattgctggaaacttgtgcttaccccttgttcagattccaaaagctctgttttgactctgactgccggcatcccatcaagcattaacattctgttctcaaaggtgttgatattctragaatagaagggagagagaaagattcagctctaaagcattcaaaagaggacctctgggagagtcttccctcattgtagtacatttagtattgctaacctaattttttaaacaataaagaataattaaatgaaaatatcagcataaccaattatccccctactctgaactttcatttgaaataatgaccaagcagttgaattaagcagtctgattctctgacctctgggttggaggtcagactgtaataaactggagtatggaaaccttacgttaatttatatggggctgcaacaattcatcacactttcacaatagtggaaggaaacagaaggcaagtttttctcttcccttagttctggaaattgcattgtgcaaagatatccataaaggagaaaatcacataaaaatttataaactctcatattagtcaaagcctaaatcatttaaaatcaatataattccatacatttaatttttatgtcatggcaattctggtcaaatgaaaatttctacctatcaacctccaaatatctactttaaaaacaaccaacataaatcttagattaagagtgaatttttaggctaaactaaataacaaacaattatttggtctttattctggtatatgttttgctcaatttaccacctcttgaaaagaaaatcttatctatattgtagctcaataacatttcaaacaccatttataaaagattaaatcaaggttattttctacgtaattgtcaccgccttggggattttctacagtcagcaacccaggaagggagtcagaatcacacttcagtgctcgcctaaggcccaaatcaggctcatatttttaaacatgtttagaatgctaatttctctgttacatattgactcaactacaaatctgacagaactaaatttgattgagattttagaatggttatttttacttaattacagaatgtaaccacaggacactaaagtagtcttattaagagaaaaaaaaatcagtttctaaatattttgcctacctggtgaaaaagataagtataatttctaaatcttcaggtgttcacctttaatatggttgctttcctacaaaatagcaggttaaataagaacaactgggccaggcacagtggctcacgcctgtaaccccagcactttgggaggctgaggcgggtggatcacctgaggtcaggagttcgagaccagcctggccaacacggtgaaaccccgtctctactaaaaatacaaaaattagctgggcgtggtggcaggcacctgtaatccaagctactcgggaggctgaggcaagagaattacttgaaccttggaggtggaggttgcagtgagccgagatcacgccattgcactccagcctggggaacaagagtgaaactccatctcaaaaataaataaataaaaacgactctcctttcaacaaatcataaattacatgttcttattaccaaataataccaacagagtgcagtatagtgaaactatttctcatatttcttgactcttctttttgttaagaaaaatgttccaagaaataaaacatacagagcctccaaggaatcaacaaaaaaaaagcaaatttactctggagttaatgagcatttaaaaagtctacaccacctagtctataaggtgataaaaagaagaaaacaaattactgtcaatattatttccccataaatgttcaatattttcaaaactggcaggatactttttaaaaatgtttgcttttgacttgtcccttttttcagaattttatatcttaatagataatttagagcagaaggaactgtggtatattactggtgagcttgggtgagttgttctaaacttgaaaccctttcatggaggcctgtgggttgttttcacatggggcagggatctcaaatcctaatgtgtcactggcttccgaggttggcagcagccagcttggcttaccaccatccagtctcaggaaagccttcctgcagccggccagccctcgactctccggagtctggcagcagctctaggaatccaccttaacaaagcaccctgtaggctgtttggctggtagacaatgaaggatgagctgatattgcttcctaccctggaggagttcttgcccagatgagaaggcaagaagatgccttataaggaaggcccaagcaaaagaggagaaaagacaaagagcgattctggaaaagcagatttaatgaactgttagaatctgattagaggctaatgtcccttttagtgctttgtaccaatttacagctgatatactttaaccattttccccactggctgtgataaactcattagtttaaaaaatggaagctaaccagagtctttgaagttaaaaactgataaatcataaaaacctgactgggtctgtgttccacttaacacatttaagtatcactatatattcatgatggtttttctttaaatttatattgttcttgaataattctacatgcaataaagtcaagatgtacggtttagtttcacgtacaagtgaaaaaaataaaacattctcgatttttttaagaaatcaagatttcctggaaatctttctatgattttctagaatcattcacagccacaactataataaacaccataaataacaatgttcacagctggggaactaagcttcaactgttaaactctttcaactagtgcagattcaatctgtatatatgcctgttgcaaacacatgtgaagcatattcaactctgcattcacggatctaacctcaatcctcataaacaaaagcgttcagtatcacagcatgctccaaactatctaggaaggtgtgtgatttttatacaacacatggtaattacacagcattgacaatacagtccttgaagcaaaatattgatagatgtatctcactgaactaagatcagatacatataatctcagatgaatgtagactttaaatatgtactagattctaataatctggaactgctgtcaaacatatcttgccatgatcttaatcaaaacacatttgctgtggaatcaatagctcaactgattcctaagagatgaataaaattacagttatcaattttagtaatgtagtattctttgtatatttataacaaacattttgatgttacacaaccctcaagaaatactttatgtatgcttatacacttgtttcatgagtgaattgtttgaattaatgaaaaatcatccatagaatttgttagttggctgttgaccaattccatgtgcacgggatgagaaggataatcttgatatcccatttaccaaatatgaattggcaatggccgggcgtggtggctcactcttgtaatcacaacactttgggaggctgaggtgggcaggtaacttgagctcaggagtttgagaccagcctggccaacatagtcaaactctgtctctacaaaaaatacaaaaattagccaggcattgtggtgggcgcctgtagtatcagctactgaggaggctgaggcagaagaatcgcttgaacccgggaggcagaggttgctgtgagccaagatggtgccactgcactccagcctgagcgacagagggagacggtctcaaaaaaaaaaaaaaaaaaaagagttggcaacacagtagtcgagctgacattcgctctccctgtcaaaaaccatataatcacaacagtcgttgatcccaacatctcaaaatattctgaatgtaatgtgcagcaaggaaacggactgatcttcaatgaccagaactcataaaaacatacaatggggtgactttccaggtcaactcctacaatgtgccctcctaacctcccaaggcaggtcatttcctttctctcctcctgaccttgactcattttgcacaaatggagtaataaggagctagctaggcaatactcaacagttctaagcttttaaacaagggttcctgtcataagtcaaaaataactgctgctatttgttttgctctttgtaaatacaggaaatatgatattttattgaaatacacatccactttaaatcttcacgttcagctacaggtgatgagaaataagaatatgtcgcccctgccccacatctacattatgctagacagtgatgtaagggacatatgaacagtcaagattcactgcaccaagttggttgggacactttcatagcagattctttttttttttgagacagagtcccactctatcacccaggctggagtgcagtgacacgatctcagcttactgcaatctctgcctcccagggtcaagcaattcttgtgcctcagcatcccaagcagttgggattacaggcatgcgccaccacgcctaattttttctattttttgtagagacggggtttcaccttgttggctagcctgttctcgaactcccggcctcaagtgatccatctgccttggcctcccaaagtgctgggaatacaggcatgagccaccaggatggcatagcagattcttaaaggtttgcaatgcaagagtgccaactggttaaaagtaacatcctgtgggtacctcttcctatagaaaaagtatcagaatcagattacagggcaattaggggtttgcataaaaaagatttcttagagaattcaacttctctcacttctaccctaacaaccacaaacaccaataacagcaatttttttcaagtcctattgcagatgtgccagttccactaacaggttaacaactaattgcaaaacctttgcttatatacaagcacattagtgaattcctccctctctctgggtaagggttaacaaacctaatagattgaaatcatgtttaggtaattatttcagttgtctactgccatgcaacaaatcacacagtggcatgaagcaacagtcattttgtcattatcttggtaacaaaaataatacagatatttgcatatttactgtgagccagatcatgtgccaagagctgtgcatatagctgctcatctaatcctcactgcaacccaagaggttgatgctgtattatctgatgttgaggcatctgagacataaggaggttaaattgcccaagcccacacaattagtaagcaatacagctgtattgaaaaccagtgagtgtgaccccaagccagcactcttaatcaccatactctatgtacctacctgtccactcacttacctttctctatatcaatatgcactcctaatacaatagaaaaaaaatatgaacaccttattgaaggtcccaacagagacattgtggaatctcagtaacagctcctccctgagctgggctaatttagctatggaactaaatgtgaaacttgtggtcactggtgagtagcaacgatttggagaatcagtctctggtttcaaagctatttcaaagctattaatattttttttccctttaagtcaagttttccacatattttcttaacttgatgagattatatgtttctatcctaggaagatctcataattaatttagccagtaacttcatttgctacccagcttttaaaaaatattcttgcctttggtggctcactcagtattttcaaaatggtttcatggccttcaatgaaacgctaacttcaccttctacattttatactcaggacagatgcctctcagcattacatttaatttataatggctaagtgtaaaaacatccttttctctactcacatatcctcatgctgataactcagtttcatagagggcatataactaatcaaagtaccagaagtgggacaaaataaacatcccttcaaacacagactttgccattctagcccagcctttcatcttacattcttttgcatcttaggagaatggatatcaatgtcaataactgtattttattaacagaaataagagccaaaaccataggcctattgggactctcaactaaaatcccccatatgtttcaatgatccaaattacattcttctgaaatatttgtcttcggtttcaaaaacagaatccttccattaaaatcctcacattgaagcatatggaacagtatctctcctaaagactggtaaaactgtctatgtaatgcagcaatttttaatttcctgatagcaattatcagtctgtttcctatgttggtaaagtgccaagctatcacaacaatgtgcagtttatactaatattttaaaaaatatttcctattagtgatagttgctgaactagccatgaaaagcagatgttcttattcaagttgcaaatggatgcttttcaaaagggcaaccaatccaatccaaactgggagccaaaatttactattggcatttccaaaggcctcaatacatttttaaggattacaacagatgcatgcctactttcctttgttcattgggcagaggatggttaaaatgacatctgagcttccgaataacacttttcaccccagcatttacacaaattgtactagaaaagtatttctgtcattcatactctgaaaaactgcacacacttgggggttgtgagttggctaaatctttccttaaatattcagtgagggcctctacttgcccgtcattccattccatctgcaccacagtcatgaaccatggataagaggagtgttcagaaagcaagaaaacatcatggcaagagaagtattaacctaccaccaaccaatccctagagaaggaggacaaaacttcagttcagctgaacaggtattaacattatgaggagagatctgacatgtggaggcaggtattagggtagagatggacttacaagtgggtttgatgtcaggtaaagaaaagaattgacttcagtcctggaaaaggaagccagaaacaagatcctttctgggagatgaggctagcagaaactaatgctcaggacctacccacaacagtccagagctaggaaacaggagtagagagaaaccagaaagctggctgggtgctccagtccatgatgccaggcctccttccctgggcacatgcttggacacagaagccaggcaccatgagcctgggcagaagtgccaatgcagcaggcaggcctcatagacgatcaagaagtacatttgcaatacaaccacaatatcctcacaagtttccctaattttacaaattatgataacagttataataacaataacatttattcaacacatgtaccaggggttgtttcatgtgctttacattcattgcatcattcatacattgattcattcccaatatacttattgaaggccagtcactgttccagttatttatgatatatcagtgggcaaaaaagagaaagttctgtggagtttcattccagtcatttaatcgcacatcaactttttttaactacggctattttagatgagaaaattattaaagtttggagagattatataatctgtccaagattatgaaaatgacaatgagtctaaattcaggatgacaatctattgttcattgcttccagagatagagatcctcaaagcacagggtactttggcactgctacaaagctgtgtaagcctagaactgtgcaagcaactctggctagtgggtttcaggctcctgatatatcaagagaccaagtaccacggctgaggtggaagcagcaaggcaaaggcaaactgatcccatatacaatggagaggagagctctaagctcattctaaagttcttgccctgacctacagcaggtgcctctaaccacttccccaaccccattgtccaccattctgttcaggctacatcttgaccatatcaaaaatgctcctccctccaggactatgtgcattctattccatcacagtattcaccactacctgacagactctttatatgccattacactagaacataagttccaggaggacagagagttctctttttgttcgtaacagtactcctatcctagccttgaaacttacaccattaagtaaataaatatctgttggactaataaaaaaatataagatccaatcattctccaggatctaggagataagcttgttgttgacagatgggatgagcataggcaaaatcttaaagagatatgaaattccccatattggtgaacaataaaacagaatttggcatggctaaaacataatgttcattggagaagtaactagagaaaagaccagaaaagttacttggagtcaggtcatgaagggttgtatcagtcccttcttgcattgctctaaagaactaccggataccaggtaatttataaagaaatgaggtttaactgactcacagttccacaggcttgtacacgaagcatggctgaggaggcctcaggaaacttacaatcatggcagaaggcgaagaggaaggaggcacatcttacatggctggagcagaggaagagagcgaagggggagttgctacacactttcaaacaaccagatctcctgagaactcactcacaagacagcagtagggcagtggtgctaaatcattagaaactgcccccatgatccaatcacctcccatcaggccccaccttcaacaataaggttaaaatttgacatgagatttgagtggagacacagagccgagccatatcaagcttcttatatgttatggtaattcatttcttcaaaaatgtttctgtaatgcctgttgggtgctacttgctaggggtgcaagtgaacaagacggaaaggctccctgccttaagacagcttgacgtaaaaggggaagaaaagtgtatgggcatcacataacaggtggtgacgagtcatgaaggcttattaagcaaaagctaagtttaagcgttgtttacagaaagacaggactagaagcaatttggaagctgacttacaaagatgtctgatgtgatacaagagaaactgcagccagctcacagcccaccacaacaggacatgggaagaggtggtgaggtcacagtggcagtgggaagaaagaggaggaaaaatatttgagagacagttcagagctgtacagcctttgatgactgagatgaaggaagtgctggtggtaagaaagagctgggagaagagtgtcaagaatgacaaagatttttctagattttccactaaggttaagacaggaaaccaaataggaaaagaaaaccatgtcacaatcctcctatatccctcaaaggacctactacattctgggatacatgaatatctgggtatagtatttaatttcaatatattttgcttacctaaaatctgttacacagagggaaagatttctcttaagctgcgcaggttcaaatcatataaaaaagactaataaagtcaaatttatccaaacatggaaatacaagtttggttaaaattaaaaaaaaaaatgctatcaaccaatcctctgattagccacattttcaaaaaaaatttactaccattttattctacaaactcatggttatcaaaaccaaaaaacaaaatacaaattgctatttgccaaagtagaagtttgagtactgtacattaacatattcattggtcatttccctttatgaaaagttgtttgaatagtaatgaaaaaaacattcacaacactgaagggagtatgtaatgaaataacatcactggtcttttgtgtcaagagaaaatgaagattactattaagtattaagtcatatattttctgtgggaaacaaaggaaataattattgacctaaatttccaccttttcttgtgtacaatgatttcaagttgctccttatcaaacccaaaatggattaactttctacaacatggatcagtgagtgtttagctcctgcatagcctggaaaaaaatagtgctgaagagttgggaaaaataaaagaatgtataggaataataaaaatccaagttaagtttttaaagtgtgaccattccaatgaaaacaagaaagagcaagcaaccttaattttttctttggcagccagaaaaatgtgcacactgctaaacaagtaaactaagtaattaggttttgttttttctttcttttttttttttttttttttttttttgagacggagtctcactctgttgcccaggctagagtgcagtgacgtgatctcggctcactgcaagctccacctcccgggttcacaccattctcctgcctcagtctccggagcagctgggactacaggcacccgccaccacgcctggctaattttttgtatttttagtagaggcggggtttcaccatgttagccaggatggtctcggtctcctgactttgtgatccgcccacctgggcctcccaaagtgctgggattacagacgaaacccaccgcacccagcccggttttgtctttttctaagaatctacattcattctcttcatatatttgtaatttaaatatttagttaaaactttgtgcttatatgtaattttatcttcctctgaaaaccttgagcatggtattggtttctagtggaatgtatgtttccaaaaaaaagtgaggcagaaaaaatgatctttagatttttacttcatccaagaaaggttatcaaagcacataaaagcatgacgtagtgtttgccttgttattacaaggtataacaaaagtagttaggactaaaagattatttcaatactaactaagttgtagcagtttgcattgtctagacagtcatgtcagacacctaacaagaatggccatgcctttcctctttttcccaccaacactctggatgctcacaatgcagagaagaaagatatcttgcatttctatggccaaatgcatacacttgacccaatatataatctatcaatttttcaagaatatccacttccaagttaagatttttccagatttcccaaatgatgtctttagttatattaaattttacgtataatccaattactgtactaatttgacatttttattggcaatgctgttaaatatctaattcatttcacccaaatatccccaagaattctgtacactttcattattgcatagagtacaagttagaataggacattgccttggagcatgggcctgatgatcagacttcctggtttagtctctaccatgtatataagtccaggtgtatgagactttcttctggtttcagttttcttatctgtaaagtgctgataaatttctgcttcatataatttttttaagacttcaaagaggcaatgtatataaactgcttagcacataatgtcttttacaaatgttaataggtaatatttaaataattataattagtaatagcagtaatagtggtatttcacttattcttcccaaactgatttttagaatgggtgtactaacctgattttctttgactctttgcagaaaccactaagttttgtgtgttatattctttataaaactattacataactaaaacagaaatgttaagagttgttttttataaatgatgacaggaattgacagaaaactaacccacacaattaatacataattgtggaatacattaatatataattatggtaaatggcagcaatgaattattttatctgtttaaaactgtgacgatgtacacaccgattacacagaaatacaagtcacttcatcctaatgaggacatctaatgttttctgactactaaagacaaccatgaagtgtctgatagtgcttcctagcaagcaaattctatatttgacatagtgctaaataaaaagctttactggttctcctttatgtgattatccagaaatatactgtttaagagaaagacatttattactgaacgtatttaacaaacagattactggagaagttatccacaaagtggcctgtaatttgagccctggaaaactttcaaaattacttgaggaaatcaaaagaactacaaaggaaataagttgctaaatttcaaaattagcctgcatttagggcaatatgaagtcagcaataccaacacctctgtgccattacacatgttcctgtcatcaccctgacgatgttctttccccacctccgcttttccacattttaccaaccatgcttgtctcttcttggaatttctgtaggatgtacatgcatgtacataaataaattaaatccagcattcttttttcctttctggagtatttctccaattctaaaacgtaccacaataaagtcataaaggaaacaaaattcattcaacagaaatttggaatacatttttaaattaaggaattatataactgcacagcatttactcaggccttgttacttcctgccagcctcttaataagcatgacccataaaaatagaaacagtataattttgaataactgaataacttatcatacccaggaagtttctattaccctcttttgctatttgatgctgaatatggctaaaataaatgttgccaatagagagagtatatttgaggaagtccattgttgtaactcacatattctttgagaccagggtttcttgacatctgcactacagacatttacaccagataagtctttcttgtccgggctgtcctgtacattgtaggatgcttagcagcatccttggcttctgccactatatcccagtaacatcccctcagttgtaaccatcaaaaatgccttcagaaatagccaaatgttgcagaggagaggtagtaaagcagcccatttcagaaccactgttttataattgctgattctatgaactcattagaaaagaaccttaattttgtccaggcatgctgggtcacatctgtaatcccagcaccttgggaggccaaggcaggaggactgcttgagcccaggagtttcagaccagccctggcaacatagcaagaccccatctctacaaaaaataacaataaaaaaaactagacggtcatggtggtgtgcacctatagtcccagctaatcaggcttaagtgaaatgatcacttgagcctgggaggtcgaggctatgacccataattgttccactgcactccagtctgggcaacagagtaaggccctgtgaaagaaaggaaggaaagaaagggagggaagggaaggaaaaaagggaaaggaaaggagggaaaggagggaagggaaaggagggaaaggaaaggaaaagaaaggaaaggaaaggaaaggaaaggaaaggaaaggaaaggaaaggaaaggaaaggaaaggaaaggaaaggaaaggaaaggaaaggaaagaaaggaaaagaaagaaaaggaaaggaggaaggaaggaaccttaattttatgttgaattatacttcccaataaaataatacctcaatattgaaagaaaataacacctgatataaaaatcatacttataatttgcttcagaatatatctgctgggaaattagcaatactttaaaagataattttattattttccttaaattccttctatcctttctgcatatccaagtttctccaacaaacaagtgcaaagatcccagaaaagggctgcaaatttgcttattagttcaagcaatggaaactgaaagaaacctgaagatttcaatattaatataacaactaaggaaatctctctggccccattcttagacatggccaatgaggatctactaaattagcctcagaagtctccaaagtaactacaattacccaaattaatatggtgacttaactttcaacagggaactagaagacagagttttatccttggctctacatcagattggctggataagatctttagattttgcattccttcacaaaaacaaagagtgacccctgtatcaagaacaaaatatttcacaatatgaactgaaatataaacctgtttatattttattaattttgttagaaaaaagtgacataaaatttaatatatccttgtggttgttccatctagtttctgtgaagaacaataaaaatgatcacaagttatgtaaataaattgctaaagaaacgagggaagggtgctctttataaaaaattaaaagatacgctgggcagtagggcaagaaacacaggtttaaacgttggatcctttctagaagatcgtactgttgattcacaggaataaaagagggaattggttttagaagacaggagatatgcagaaaagcaaaccacaaattcacttcttttcgcacatgcagttttgttgcaccgtctatatctgtgctgtctgggtagccacttgttgcaactactgagcagctgagacatgactagtccaaatttagatgtatgcaaaaagcatattggattttgaagacttagtataaaaaatagaatttagcatgtctcataatttttgaattaattacatgttgaatggtattttgattacactgggttaattttttttaactttttttttttcttttgagacacagtctcactctgtcgcccaggctggagtgcagtggtgcgatctcggctcactgcagcctccgcctcctgggttcaagtgattctactgcctcaacctcccgagtagctgggatacaggcacacaccaccatgcctggctaatttttgtatatttagtagagacagggtttcaccatgttgaccaggctggacttgaactcctgacataaggtgatctgcccgcctcagcctcccaaagtgctggaattacaggcgtgagccactgtgcccagccaatttttttttttaaacttgtaaaatgtctactagaaaacaaaaatcataacttcttttagtgtctactagagtactgaagattacatatgtggattgtattctatatctcttggacaaagctgttctacattatcatgtcagtggctctcacactgaattggtaccatgatcttacctgtagtttccacccaatctttctggaaattgaaaggtggcggggagtgggaagttttgaatgtcataaaattggaagaatgccactttcctttatcacccagaagctagagatgttaaaagtccttagcgtatgagtcagtcccaaacaacgaactgctctatccacaatctcaggtgtgccccaactggaaaacacgaaggtgatctcatctgctaggcagacttcagcaactaattgctgaaacctaactttgtatctttagcactggcctctttatccccgaagatccagaactatattccaactgaccccttaacatctccaactggacattccatggggatggcacaactaacaaatccaaaccaagttcagcatctctgacctccacaccccccttccaaaaaaaaacgcaggcaagaaagacacatcttgctccgcatcatgaattttccatcaaggaatgacatcatcattgacacaaccctatttctcaggctagcaactgttcccttgctaccccacataaaacttgttaccacaattcttggccagtcacagccggccttttctctctattccaattgtcattgtcccatatatgatggtattttctttcatcccaccaccaaagacattttgggacagagggaaattgttcctctatgtctacagcttaactaatttaaccagcatcagaggaaaatcttggcaattgttgatgctagataaaatgtaaggtcataaggaagccttagaaaatatgtctgcattttatataaaatatatattatttatattagatatattaaaggagaaatgaagtctactagtagataaggataagtgacttacatagcagttaaaagtattatatataattagatgtgtttaaatatagtacatgtatatggtaatgtactacatatgtaaaattatatatctcatgtaatatatttacatatgaagtgattctcattatggttatttcaggcaaatataaagagacattttaggaaccttatttctcaacacattatcaggtaaatgctgtataaaaacaaagatattgcttctagattttaaaagggcaatgcataataaaactttattttgctcctaatagtttagtctgaaagatcagacgatggcaaaccaccaccaccttttgaaagttaaaattgcgggatcaacagcctcaaataccgcaaaatgcaagctttttttgttttaccattaacttgaaaccctactaaactccctgaaaaaaactggagatacataaatagatgagaaacatcaggcctacaggcatcctggaaaaataacaatattcacagccaatgtgagtctcaaaaagtgactgaacaatcgacctgcttccagtattaaaaataataattgaaatcaatctaatgtcaaacaattgagaactagatgaatagattatgagacattcaaaccaccaaatatttatatattaaatatgtagctctttgtcttgatataaatgacgaatcacaaagaagtgaaaaaaacagtatgttcctataactttaaaaataatgcatatgagacagaaaaagcatgctaaaatgataaacactcaaaattggagctgatagaacatggagtgagatttttcacttgctttgacatgttttctcactttttaaaataattttaaatgttatctatacaattaaaataaatgcttgacagttcaaaatgtgaggcaaaaaaagagtcaagtgggctaaaaaaaagaagagccaatggttgggataaaaaaaacaaagttcctatacaggttagcaatcataaagtgtaaaagagtcattttggttctctaaccagcaatgtgcacatacatacaaacacatacacactgtcccatatatactcatgttacagttacaatttaactaatacaaaacttaaaaatatgcagctgaaactgaaacaatgtattgtctaagttatatttgtaactgatatgctgaatctgttatacagcttgaactgcactatcaaaacgtttgcaaatattttcattatgcagagatctatgttatactgttaactcatctgagaatgatatgttttttatgttctagggagttccttgacaatagacaaatggacacattatactattatcttgtgctaagtatttagcatccttaaaaaagaaattattggccaaatactttaattttatttatttatttatttattttttaactacagggagtagccagtgagtgtacttttaaagatcttactcataggagaaataaatctttcctggttctgtctggggaaagtacacaagaacaaaaagatttacacttgtcagatttttgaataaaacatactatcttataatcacaacaattagattctgccctcctttgagcctttaatcatgatagccacattctcagattatataacaatattggaaatgttttttgagaaaattcctagagagttattatgaagaggactgtgttctcactaacaatgcatttttggaagaactaaaaatatcctctgggtattttcttaaaaaaatctttccggtttcctgcctagcatgtaagaagcttagaagtagccactccatcctaacaagtgagaagctgaacaaaccgaaaaaatcaacaactcttctcagatctgttagagaagtcacaggcaaatacagtcccgaaattggagacaaagatggaagacacagagaaacagaacttaccagggaagaaaactctgtgagaaccagtattcaggcaggaaaccccaaattgtaattgacggattgctagggactcagagtggacaactctaggagttaaaaactccagggggaccaagtcacagggggctcctgacatgtgtacagtaaaatctgcaatcttacctaaatttaataaaacttaaggagtgtgtgttataatgagactttagggcaacagacaccttaccaaacaagacaaagatggcaagttagcatatgaaaagatgttcaacaccatacatcattagggaattgcaaattaaaacaacgagatgccattacacaactattagaatggccaaaatccaaaacactaacatcagcaaatgtaggggaggatgtggagcaacaggaactctcatttctggtagaaatgcaaaatgggcagccactttggatgacagtttattagcttcttacaaaactaaatatattcttaccataagatcacactgtcactgtctttggaatttactcaaatgaactgaaattatgtccatgcaacctttatagcagcattattcataatccccaaggcttggaagcaatcaaaatgtccttcattaggtgaatggataaactgtggtacatccagacaatggaatattaatcagcaatagaaagaaattagttatcaagccatgaaaagacatgcaggaaccttacatgcatattactgagtgaaaaataaatttaaaaagccagtctgaaaaggtaatatcctatatgatttcaactctatgacattttggaaaaggcaaaactactgacacagtaaaatgatcaagagatgccaggtcttaaggggaaggaaaagataaacaggaagggcatagaagatttctagaacaataaaactatttttatgagactatgatagtgaatacacatcaatatgcacttgtcaaaacccacagaatgtacacaaagagtaagccctattgcagactatggacttcgaatcacaatgatgtgtcaacgtaggttcatccattgtaacaaatgtaccactgtcgtgcaggatgctgaaatttttaaggaggttgcgtatgtgtagggatgaggggtagatgggaactctctgtactttctgctcaattttgctgtgcattcaaaattctaaaaataaagtgtattttaaaaatctcttcgcaagtttaatcacaaattctactttttaaaattcaaaaacaaaaagaatatactctgtaccatggtctccaaaaaaagcagttaaaaataaatggacaattcgataatgcatttcctaactcacttcaggggtactataattaatatttagacatatgtaaaaacactagtgcctaaaagtaaccacgattgccaagtctataaaattataaaaagtagcaaggtgctatctcaagagttttgaagaaacagaccattctctcacacaattttatattacttaagcatacttgtaacagagattcaaacataattctatcaccccacattactttttagcattttgtcaacaccaatagaagggattggttaataatttgaaataccaggcaacatgggcaaatatatcattctgcatttaatcatttttcccctagcagtaaagaaaattgctatctggtatacttattaaataaaagattaaaatacaattaaataaagcatagtcattttgtgccagaagatgtaagaatatgtgtgttctattgggatagaaaaatcaaagtttctatacaggttaacaatcataaagtataagagagtcatttatacacacacacacacacacacacacacacacacacacgtatatatgctgaagtatagtacttcagtatacacacacacacacacacactcggaattatttgtatgtccctgaaaaacatccagtgggaaaaaccatcgcaggcattgagacacagcactctgcctcaactaaccttaacttttctatttattttcaattttagaatggattatataaacgttaaaaaatggttttaggttttactacttccaacaattaggacaagtcattcaacaatgtttttggaacatctgtttatatcaactaccttttaagttaaaaagttttcggaaaaataactccaattttctatatggaaaagtttcgtatataatttagtactcgtatgacgctaataatgccaatggataaatctttcattttcaatactaacttcagaaaatcttaatattttgacatagaaaataagttgtcaaggagaagcagaaatatttatctaaatgtaattacttgaaaaaacattgtttatatttatgcaagctactaattttaaataagaaatcatgtacagcttggatgctaaagtctgattgattggttcagaaatgcaaacacccaaaagaactggcaaaaagattgtgcccctcaataacagatgagaagaaaacctagcactatgggattatgaggtggaacttaagcaagaacagtctctgaggttcaactcatgcgtttgtttctacaatttattaccagtgaaatcaacaaatggggaagctagcttgaaagtactgacagattccttctgaagtattgtgacaaatgtctaattttataccattcatgaccttccatccaaatagtgggcaatggaaaagtaatatgtgtgacagtataactagtaagagaaaacccaggtaccctgtactttcacacacccacaccaactacagccatggatgcagagacataaagagtccacaagaaaacacaaatattaataagtaggtccatgcaacagtgagcatcttactggctcctacccacaattcattgatctttgcatctcccattgtttacagaatagctcacagaacacagaagctcaaaacagcctacccaggtttttttccaggttattggacattgacaatagcaaaaccaccgctcaatttcagaaacactctataagaatcttaggtcagccgagcacggtggctcatgcctgtaatcccagcacttcgggaggccaaggcgggtggatcacgaggtcaggagatcaagaccatcctggctaacatggtgaaactccgtctctacttaaaaaaaaaaaaaaaaaatctaaggtcattctagttttagtgtatacccgaaagctttttggaccccccaattctttcaaaaaggtatcagaagctggacatggtggctcatgcctataaatcccagcactttgggaggttgaggtgggaggatcacttgagcccaagtgttcgagactggcgtgggtaacatagtgagacctcgtctttacttcaaaaacaaaaaacatgatcagaataaatggcaggaggcacattaaagagaatctgacacattaaggttgatatgaacctagcctatgacattccaaggaagccaaagacaaaacaggactgtaagcagtgcttcccaattattttcacactatggaacatgcaaaaaaggtagcagctccattgcataccggggtaagcagtttagcttggccttggcaggcagtcccaaggggtagggatgcacatctcaggtacacttgtaacccatctgtgagggatcagtgtgactccagataccataacagtcaaaagcctttaccttaggatccaatgccctcaacatggctacttcacaaacaaagctaccatcaacagcaaaaaaaaatagtgctgagaactttatactttaataggtcaatgctgccaccattaaaaatacattatcccatgacaataatacatatttcagacgaataatacatatttcagactaaagactttggggcaaaatattttaatgtcaagtctccataagaaatattttattctaaaagcactttattttgatggctcatttcttcattcttccatcggacctaactaatatatacaaggattccagcctctaattacctctgtacagtcctctacagtgataggatgtgtaggccaagcagatatgatgggtggggaatctggctgtcaccaagccaaagatcttgcgcttgtatctacatggctgtttacgatccatccccttctgcgtggtccatgcagtgataacgtggaggctgacttagcatcccaagggcagatgcagacaacattcacgcacataactgcacactgctccaaaacttctgctcccctttccacctttcatctttccctttccagaagcaaataaatatattaaaatttcccactctcaccaaaaggcataagatgactggaacctctgtagaggttattaagcccctattataacatgctcttcaagctacgaaatgacaattttataccaatgagctttcttttccaagttcttctgatgtagctgctatgtaaattaaattaagagcaggccactctaatactctagtaggcggggctgtaaactgcagggcaatttggcagaaaatatcaaaagccataaaaatgcatgtacctttcaatctagcaattgttaactcttggaatttatcctaaggtaataattaaggatgtgcaaaagagtattaatttccctgctgtttgtaattactaaatcttggaagcaagctaactgcccccaaattggatagtggttaaataagttatcacagaaacataaaaatcacaaatgataattctgaaagatgtagaaatgtgcccaatatataatacaagcttgtgcatgtcattcttaagtatcaaaatcaaaatacagataaattatatgaagctacctcattattccaagagcagttaaaattatggtagctttacttttctctctgttttctgatgtttctctaatgagtctataatgaacatgaatagttttgataaagagaactaaaagaaaaaaaagtaaaagtttagagaaaaaaatgccaaataaaaagtatctgaaagaggaaggattaggaacaagtgtgattgtgaggccctgaaatgtgcagccaacattggtcatgaaatctctgttccttggggatttgtaagaaaagggtagccaagtctcatttgaggacagcttgaatgcagtcctgacctctgtggcctcttgtagctccatgtgcaaaaagactcagccaaaattcaattttcactcactgacacacaaagtagtcaattccttacatttgcccccaatcttccacaatcctttctcctgttcaagagacagcaaccttaaagtcttctacccagcaacgaaacccaatgacactgaatttatatgcccagtaatgtgccggcactttactcaggaaacactgtcaaatgttagttaatattccaaaacatgcagctgacttctagctaactgacttgtccatgttaaagaaaaattataactaatttcagccacttaaatatcccagactgagaaaaagaaaatgtaaaatgacatgcattgcatattgacctgtaagttttataactaaaaatcttataaatagtaaccaaaatgacttccaggatatgcgtaaggacaattaaaaatactcacttctgacaagttcctttgctttaaaaaggcctctaattttgttttctaataccttcctatgaatgcaaatgtaacacttcccaaatccataattaaatgcatctttgacttgggaatctgttttcctggcccatgagaaagagttcacagaagatggagagtctgagcatcagaggggtttaaccaagaatgatccattaaaataggtttgcaccagttaccaaaactgagaaaaatgagtttgaatctgtgcagagaggcacagaaatgccaaggtgaaggagcctgccaaggctggaatacacggtcactaaacaaataacgcatggtgtattcaacgccagaagaatacagtggatgatgtgtaaatgagagtctaagggacccagctccaagacaaagtcaagattttaaaaaagaaataccactcctgctgagactctcatccttccgccaaggaggagtccatgccatcacctttgtaagcaaggcatctgatatagataaccccatacaacccttaaggtgtattattcttggtaccaaacatgtgtcatttttacaaaacagtcatccagtcataaggcaggtctgtctcttcatcaataagcctcacttatacagcattcttaggaatattgtgttctcacgagtttcgttttctggatgggtgaggggttctctcttttaattgcaaatttaaaagagaaaatactaagtacttgggatggaaataatcctaatatcttctacatagaaggcaagggacataagttaactttttcctgatgactcagactaataattatgagcatcagtgacgatgaaatgctgcatactgagataacttcagggcccactgaagtgtatcgaggctcagtgacctgaaactgctgtgcttcttgagttcttgtatctgcatattagagtctgtcaggctactacttctcaatatggtcatgttctttttatagatgctccttctgccctatggtgaaacagaaagaacactgaacttagagtgaagtcaatttaggttattatttctagctgaatgatcctggataagtcacttaacatctttgggcccaagtcaaatgaggaacttcaactatctctcaaggtccttttctttgctcagatgcttaatttacatttgctgcttctcatctgttgtagactttgaaatgagaaaaataagtcagctaaatttgcataggaagtaacataaaatagaaatataagcacacaacatgctctcttgtaagtgaagcataaataccttatgacatctatttgtcttctcagaggccttacttgtgtaatttgtagtcactggtggggtctcagacagctatgatttctggataattatgattctatgcatgatatttcactatatttccatatgcttctattttacctaatattctcaaggcaaatcattatttgataatagctttatttcaagccaccgaagaagagaatctgtgtatctttcgtcgtcatctatgcttgtcagcaaactgcaaaatgaatactctcatcttgggactttgacttattcaatggtttcaatgacactgaccacttaagaaagttttctaaaagatgatgcttttgaaaacataagacacagtagaaatgtaaagaatatttttgcaaactccacgaggaaagataatttattcgtcttttattttctagagtccctaacacatgatttgtctattactatcatcatcaggaacttaaaaaaccacatccaagtccacttctcttctccctcgacacgttgatccctgaagtccaagtcatgctcacagctgtacttccagctctgcacagatcatccatctccagctcccacctctcccctgagttctggatctctattccctatcataacctccgtttggatttcccataaagtgtctaagaaagtttatattgcctcctcatctcacatctctctcccttaccccatactttaaaaaaaaaaaaaaaacctatagcaattattcgaaaattcttctactatattggagtgggaggaatactaatccaagagcatgctgggtgggtgctgcatcaggagggaagaatatccaagaaatatgaatccataattactgacgggccagaatacaaaagctacctttttggaggttctaaagcagccaatcctaggcaatgactggataatcaaagtttatactgcctgaagtgaagtgaacatgtgactatataaaagtagagaaaggggttataaagcccatggggctgggtgttatctacaatcccctaccatttatcccacatccaaaaggactgctggcaaacaggccccaggtaagcttctaagttattctctactgccttcaacagtgtataccactgggattttttacacttctttccttcttcactttaggacatgcctacaatgagcttaccttggaaaggataaactccttctttagtgacagaactccttaacatccttcaagccctcattcaagtgtgggtctgcaaagattcctctacttctgccatggtaaaagagtcatttcctcttaccatgttcagattttccactagattaagaactcctcagggatgagccctatataacacttacctctgtctccccagtccctgggatactgcttggcaccatgcacaactacaataagtattcaagacatacatggaagaagtagtactttcacagctctcacttaacaataggccaaggccattctcaaaatcttcttcatagggctaccatcaaaccttcctcttaatgcagtacagagagagagaaaatgttttatgtttacctgttagatatatacaaacaagcctcttgacctacctatcttttgttcttaacatagagacctccttataattttagacttcatctaaccaaaacctgacaaatcccacagtgcttagttaggttcaacaaatgcttgttgtttcacctcctcatgccagtggtacaagcagagttataggtccttaatttgatatatagctggtgcaattttgtatcaaactaggtcaatccatcttgcacagttcatgctttatttccagtgtggcagagtgagaaaacacagagggtagaatctgataagatggaggatttaaaccatagcaccaacacttcctccttgtgtgaccaatttcttatctctaaaaatggagatactataatctacttaagttttttatttattattaacctaatgacaagacacatagcaaggcactttataaatcataaagcattgtacaagaactggtgctggtttttttttttttaatcacaatatgtcttagtgcaatgatggcatactccagttcagatgtactgtcttgattacctcagatccgacatagctgagaaaactgctctaagagttctgacttcctgggatcagtgtcacagaggatctgagtgagcttcctcgagccattttgggcaggctgaagaagcttgttagtatctatatgcttccaggttggcggggccagcttctgccagttctaccatatgccaactggcgacatacaggagcatgctagtgctaccagctccacatatacacacccacttccacccccaagaggtaccagactgtcggacaacttggccgctagcctatgaaaatgtggaaatgctgaagaaacattagccagcaaagcacatactggcagctgaatcaaatgtttaggttcttcaatgtacccaaataaatcgtttgtgtgttctaacaaatgttttctttggaaagcatttttcagtgcagatgcttcaaaagtacccatttttaatgggttaaatcaagggctcaaagcagcagaagggtggggaatgtttttaaacaaaattgcatcagctgcaaagaaaaaaaaatgttaacattgactgagagaaggcatctttgaaaaacagaaaagttgtcagtagttttcaaagttaaatttttatggatttttaagtgttaaaatattgtaagcacccaaaaatgagaaagttactcgaacctggcaagggacaaaaaactgtgctaattttaaaaatacatattgataaacatggttccgccaaaaaaatgcaatcaaacaaggagtcaagaagttaggaattataaattaaactcttcttgccagagacttttaataagcaattgcaaacacatttaaggatttttataatgaggataatggtttgggcgacaatcataatgcaatccaaaaacattaacttccttcacaaaatagactacataaccaaaccccagacagagctcctgacatactgccagcctctaatgcaggcacagtaatacactgtaagagacagaacaaatgatccctgttcttaggcaacaatgaaatgtatatataatttatttcggctatatcactcttttccagtttaagtccacctccatgacagtatcttttttaagacaggaaaaggtactaaaccatcaactataaagttgatactatggaggcccctgattttaaaaaagcatggtgggtatttctcctgaggctccaaacaaggaaactccatcttaatagtgactagtttcatcaccatcaagagaccttatgtaaaactactgacgtcaatgaaaatactacattcacaatggtgatatgaactatgaataaacagagctaacaggctcggcacaatggctcctgactgtaatactaccactttgggaggctaaggcagaaggatcatttgtgaccagaagttcaagaccaccctgggcaacacagcaagaccccatttcatttatcaagaaagctaacagatttttttaagtgaattgatcagatgactcataaggtaagggctttaaatagtattgttttctactcacaaattaaccagctgtacaattacactcatcaaatcagactttgggtgctaccgaatcattaagtgttcattaaatcaaaccaaatgatatgaaatgatgctcaggaaaagaaatgccaacctgtaacaaatgctaaagacaaccttaaaattctgaaatgctttgagtaaagggaggaaaaaacataatatacacgagtatgtaaaatcacagcaacatgttaaaagatttaaaccacagacgaagaatttaaaggctaacattatgagttttgattcagcagaataaagaaacactgacaataacaaacatcaacacctgaaactttccccattatcctaatacattttcactgtaagtgttccattaaagaacgtctttaaaacaatcttcaaagttcgactccctataactaattcaattaataaaattatcaatacaattgaataatagtttataacagcgtggtggttcctcaggcacatatagcccatctttaatacatattatgaataatttccttatgagacatctcagtaatattgagtataacaccaattgcatttaaacataaatgtcataagctggatgtgaaggttgattctgggtttcttataaaccacaaatttcagtttatttttatcatctagtatgcctcagatggaattcacagtaatcacagctacagtggagcaacttcaaacataaatgaaacaaataaccggcagatcgatacgaggtgacagactcctggctgaaatcttgccccagcgtgacccactactgcccttctgcactctaaagacttaatgaatcaccagaagcacactcaaggttgtgtgtgttttgcccgtgtgagagctggatttatatcagtaccaaaaaaggatcatcccctgccatgagaaaaatacaataaagaacacgtttctacaaggtactgggcatgatggtttcatgcagcatatgtatctatcgtataaacacttcatcattttaaactgaaacaccaagaatgacagaaatcagaaagcctaatgaggggataattttaaatgataagcaatttgtagtaagttgtttctatattggcaaaaggaaatggtgcaacagcaatatacaaaaagcagaaatgtaaaacccatttagctttctgaatatgttttgccccaggaaatgcataaaataactttgttatttaacactgcagatgcacctgtgggcaccaaagtactcttagttatttaaaataattaccctgtggagaaatcttaaggtctttaataaataaaaatctgtgcaatagggctcttaccaataaaaaggaaagccacagtgtgaaacaaaatgccaccaatctcccttagcggtagcttcctgccattctgctcaaaggtacagaaatagtctgcatgcctttatactaagttcagtatctgagtggctctttgaaaaggcatcattgtccatacatcaccaaaacagacagagagggcaaggacattttgacatacttgcacagaatccagcccagcccttttccagaataagtcccattccactcttcaccttgaattacagcaaaacggaagatataataaccaattctcaaagtgtagctccctagagaaaatggataggtctcaactatagtatgaaaaggcagaaagaaagattaaccaacacaagacatagaacatctgcccagcaagacaaggtaaaacaaagtcatagggaaaacaggtaaacatagcacaggacaaaaaggaagtaaagaaagaagaaatgaaagaaagagaaggaagaaaacaagcatgcaaaggaggaaaaagcactcactcctaacatttacacagcttaaaagcagaaggcttcatgttacaggacttccaaaaagtgattatcaacgaatgggagctcaaagatgaaatgataagacaacagaaagatgtcaccaagccaataaaacataccggagaccaaaaatttatcaactcagtactcgtaaacacaataaaaacagcatggaaaggaagagacatgactaaaaataaaggaatatgactaaaaattgaattaataatgtagaagaaaggcttaattccaaagaatacagaggaggaagacaaatattcttttttaatggagaaaagataagaggcacaaagaacaaagagagcctgaaaattgctgatcctgaagaacccaaaaattggatagaaaaatatttcaagtaaaaatagtataaactttccctaacacgaagaacagattgaaataacagacagtgttccaggaaaaattgttacagaatgatccaaaaaaagttatatccttaagtcactgaacttcaagacaaaaaaaaaagaattctgcaggtgttcaggcagaaaagagcaattcacttatgtgggggaacaaagaagtcaaactggtctcacccttccattaggaacactcaatgccagaagacaaaggagcatcgtctacagatttctaagtgcaactcaagaatttcacaaggccaaataccttttgactataaaagaaaatatatttaaagatgcaagaagtcaggaaatgcagcatccacaagaccttcataaaataaactctttaataataaaatccagtcaaatgagtcattaacagagacgctatggcaaaaggattactttgacactaaaattctgagaaaaagtgtgatccgattactttattaagtcaattggaacttagagtagaaaagtagctgtttaatatactcaaatataaaatttctcagggaaagaagaatttgtgatattttcttaaaattatttgacaatgaaacctagttgacaaataactgcaaatgaaaagtgatgataaagaaccagggattaacatcaaacagatttaaatgcaacactattatttgctgtttgtttagtagataaactctttttaagagcacagtacaggtttcttaattttccagaggatcaggtagaaagttctacattagcagttagctcgtaaatttattaatcctcaataaatcagtaaaagggaatcttaaaactcaagagcaacttttattgtagctttatcactgtacgttcctatttttaaaaactattattccattagtaaaagatgtatgttcatctaaaaatctaactaaatattgagtatgtaattcaaaagtaactttttttgttgtgcttctgcttttttcagctcttttctgcctataaggccaatctctgctcagctcgagaacactcgttctactgtatagaatgaggtattgtccaattctataattacaaataaaatccagttagatctttaaactatatgtgttgtaattttgttttgttacaggcttaaaaagatctcattttccacacctgattttcttggtataatttcttacttccttcttatgttcaaccccgcatacactcaataatgaaatcttcattttatctgcctcctaaacatgctccaaatctactcatttttttccatgtctacagccaagcttaggcacagctaaagacaccatcaccatcagccccttaattctcttgtcctactttatttctcgatccagtgctttttatatgcactcagagttccttaaaatgcaaatctcatcatctccatttctttccgaaagctcctcacaaacacaccttcttaggttataagtctcattatactttgggctcctcttcccttcaacaggtatatttctctgagcactttactctcaaatccaatcagtctttcctcagttcttcaactgtgccgtacctcctcctggcctatgttctttctccaccactcctaaccctcctttggcttacctctaatcatctgtaggtctgtctcttttagcttaagtttcctttgcactgaaaaatcttcacaatagaaccccaaccccaaccaaatttaggttgggcgatcccgctatgtgcagtcacagaaccacatacttccaatcaaagctttcccacactgtatggagaagtgcctttctgccggtctgcatttactagtaaaccccatgcaggcacacattacacccaccgtattcatggttggaagctcagaaactggcatgtgcctggcacataataagtcattaaaaaaaatgttgaggaattaatgaatgggccatgacagaaagtgtttttgttttggggttttttttttccccccacagctggcccatacattataaaccttattttaatcctctctaaagcaacaagtatgaaagttgttcttcacagcaactctcaatacactcttgaaaaataaataagtgaaacagatacaaaaatggatttaggagcacgcccctctggagcacctcgaagttgacaaatgatcattccaaggaaccggttgctcaagatagaaattgaagtttcatcatcctcacactctctctttcagatcaccctcaacaacaatcatcagtatctctcagttctacctcagaaacatgatgaacttccctttatctctatgtcaggtgttaacactccaagccaagccaacaccatctcatgctgccccacaacagcctccctactccagttgtttgcaattttctaatccattttctatatagaagcccatgtcatctttgcagaactcttgatcatgtaactctcctgcttataattttttaacgactacatttagagtgaagtgaaataatatcctcatcacgctgaaagaaactaagtagctggaggatgtatgttaaagtcagactaacaggcatttaggtaagatgcattacaaggaggatcactaagcaatgagacagagtcaattttctaggagtaattttaaaaattctaaatgagtacacctacttagcatagttcaaaacgttatgaagtcaaaatttttagaaacacaaggagaaagtgacagaaccatcattagaatcagagatttcaaacaaatctctgatgggagactggccaagcaaaaatcagtaaggtcgcagaaattttaagaaaagtaagtgaaagctttatctattaggcaaatatacaaggatgtatacaataagaagacaacatactttttttttttttttttgagacaggatcttactctgtcacccagattggagtccggtggcatgatctcgactcactgcaatctccgcttcccaggctgaagcacctcagcctcctgaatagctgggactacaggcatgagccaccaacacccggctagcttttgtattttttttgtagagatggggtttcaccatgttgaccaagctggcctcgaactcctgagctcaaagtgatctgctcacctcagcctcccagagctgggattacagggatgagccaccgtgcccagctagataacatacattcttttcaaacacatacaaagcatttacaaaaattacccttgaactaccccatatagcaaagccacaaaaaattagtatcaaacagactacacgctataaatataacacaatgaaattagaactggtaatttagtatagtggtttaacatagaactctcagaaaaagttataatgaaatatataaaaatgaataggattgaatgacaatacttcacaactcatgggattctagcaagttattttgtaatattgacaaattaattctaatgtttatgtggagagaggctaaagacctagaatagttaatataatattgaagaagaacaatgttgaagaaatgacattacctgactccaggaattactataaagctacagtaataatcaggacagtctggtcttggcaaaagaacaaacaaatagattagtggaacagaacagagttcagaaatagacccacataaatatagtcaactaatctttaacaaaggtgcgaaggcaataaaatggagcaaagatagtctttccaacaaatggtgctggaacaacttgacatccatgtgcaaaaaactaaatctagccacagagcttatacccttttatacaaattaactccaaacagatcacagacctaaaagtaaaatgtaaaactctaaaaccctagaaaacaactttaagagaaaatctagatgatcctcagttcaaagatgatttttttagacacaaaaccaaagacacaatccatgaaagacataactgataagctgaacttcattaaaatgaaaaatttttgctatgtgaaagacactgtcaagagaatgaaaagataagtaacagactggggaaaaatatttgcaaaagacacatctgtaaagaccgttatccaaaatatgcaaagaacgcaaagttcagaaaaaaaagagtgtaaaaaaatgtcccaaagaccttaacagagacctcactgaaaaagatataaagatggcaaataagcatatgaaaaaaatattccacattatatgatatcagggaaatgcaaattaaagcaacaacgatacaacaccacgctcagaataaccaaaatccagaacactgacaactccaaatgttggcgagcatgtggagcaacaaggactctcactcattgctggtgggaaagcaaaatgaaacagccactttggaagacagtttgttagactcctagttagtaaactaactcttaccttaggatccaccaatcatttctttttttattttttaacctcccaaagtccaggttccaggcttaatgatctagtaatcttactctttggtatttagccaaatgagttgaaaacttatatatatctacacaaaaatatgcataccgatgttaatagcagtgttacttacagttgccaaaagtagggaccaaccaaggtatccttcagtaggtgaacagataaactgagacatccagaccatgaaatattcagtactaaaaggaaatgtgtgctatcagtcatgaaaagacatgaaggaaacttacatacatattgctaagtgaaagaagcaaatctgaaaaggctacacactattataattccaactatgcaatatccttgaaaagtaaaactatgaagacaataaaacaatcagtggttgccaagggttggggagacagagggatgaacaggaagagcactgaggattttcatggcagtgaaactgctttgtatgaaactatatcagaggatatgtaccattgtacatttgttaaaacccgtagaatatacaacactcagaggaaacactaatataaaccaggaactttgggtgataatgatacctcaaggtaggttactcactcaactgtaataaacgtatcatcctggtggggtatgttgataatgggagaggctacatgtgtgtcggagcagaggcaattatgggaaatttctacttactctgctcaactttgctatgaacctaacatttcttttaaaaacagtctgcttttaaacacacacacacacacacacacacacacacacacacacacacacaaatcatggaatacagctaatgctgtctggagagaaattttttaattaaagattaattttctcagcaactaaatttagaagacaaagaatatgagaataaactcagaaattttaagaaaaagacaaagctaacaaaatagagaagaaagatacaatggaaataaacaaaaggaaatgctttggaaagactatgaaattgtcaaatccttggtaatatttaccaaatgaaaaaataatgtaaaagcaatcaatcattatgaaataaactaaataaagcacaaggggagacataagtacagatacagcgaggttaaacatataatagactactgtgaacatttttgttatgggctgaattttgtcccttcagaaattcatatgttgaagtcctaacctgtagagcctcagaatattgagactctatttagagatagggacttcagaagaggtaattatgataaaataaggtcatatgggtagatcctacttcaatggctggtgttcttataagaagaggagattaggacacaaagacacacagaaaaaaaagaccacgtgaaggcacagggtgaagacagccatttccaagccagagagggggcctcagaaaaaaatccaccctgctgagaccttatcttggacttctagccctcagaaatgtgagaaaataaatttcggttgtttaagtcatgaaatctgtggtactgtgttatgcagccctagcaaactagtacaatcttaccctaatgcatttgaaagcttacaataaaccaaatacaatttatcaaatctgactcaagaagaaactgaaaacctggtcttattaccattaaaaattgaattttaagttcaaattttacccacaaaaagccactcatcccagataaatgggttctaccaaatccttaaagagtagataattgtttatgcacattcttccaaaagatagaaaaagattctaacatagctaccaaaacccagtcagaatatttttttaaaagttacagccaatctcacttatgaaaatagatgcaaatatcctatataaaatattactaaacatatcccagtgggatataaaattatcatgatgaagttgaatagaaaaagcattaaacatatttataaattcaacaaaactaaatattaaatcaaaataaaaagtaaaaatctaccatctcagagaaaataatttctatacatttaatcaatcctgaatatctaccccatcatccctaccaaaaaagatgaccattcaatagaaaaatggtcaaaagacaaaaatgattccaaagaagctgaagtccaaataatcaataaacatatgaaccattaataacaaaatgcaattaaaactacagtgagacactatttaacgcacaccagattgaaaaatcttcaaatgtcagcagacacccacagttagtacggacgtggtaaaatgggactattaaacagtactatttaggaactgttgcaggctgggcacagtggctcacacctgtaattccagcactctgagaggccaagacaggaggatcacttgaggccagaagttcgaaaccagcctgggcaacgtggcaaaaccttgtctctataaaaaatacaaaaattagccgggcgtggtgatgcctgcctgaagtcccagctacttgggatatggaggcaggaggattgcttgagccagggcagttgaggctacagtgagctgtgtttgtgtcactgcactccagcctgggagacaaagaccctgtctcagaaacaaacaaacaaacaaacaaaaaactattgcaactacatgggaaaacaattggacattatccaggagagttgaaaatttctctacaatccagcaattctacttctgggtatatattccagagaaaatcttctatatttgtaccaggacacatttaaacgactcttcatagcaggtttaagatagcaaaaagcttaaaagaataggaatgtccattgctgaaaaatggataaattatggtgtagtcataaaatagaattctattcatttgtggaaataaataatcttacctatacgcatcaatgtgaatgaatatcaaaaacaacaatgtcaagtaaaaaaagcagatcataaaaatataaacagtatggtactattcatatgtctcaaaacaaacaaaagtaaatgatacatagtttgaacatgtacttatatatgatgaaaagaaaggaaattataatacaaaattcaggataaatggttatgtgtgagactgctactgtctgaatgtgtccctccaaaattcgtgttgaatcctaatctccactgcagtggtaataagaggcggtgccttttaggaggtgatttacgaagctgccttgtcccttctgccaagagaaaatgcagctaagagtaacccctggccagacactgaatctgctggagagttcatctcggacttcccagcttccaaactctgagcaatacatttctagtatttataaattactcagtctaaggtattttgttacagcagcccagacaggctaagaaagggactaaaaggggtcttgaaaaaaaatactggaaacaatctacttttttaagttaggtttctctgttatcatggcttacaacttacacagtcaatacatatatattcttttttatctttcaaatacttaataaattatctcccctgtgctttgttgactagagtgattaattcttttaattggttaaacaagaactttcaaagtctgattttgaaaaacattaacttcattgactaggatttgctttattaaggtgatatgctcatcacacaacagaagcagttattttatttttaaggcatgaatagaaacttaatttgcaatacaaaaagcacaaggaaaagtggttaagaaaatcctcagaacactcaacaaactaaaagaaatgaaggaggaggaggaggttccattttggggattttcttggtcccatatgcattgaaaggtaaatgtacacttaggcaaagacaattgtcagaaaggatatcttccattattgaaaggtaaacgtacacttaggcaaagacaactgtcagaaaggatatcttccatcattgaaaggtaaatgtacacttaggcaaagacaactgtcagaaaggatatcttccattaaaaaataaaaaagaaatcttgttgctagatgccttattataaaattgttgggttatcacaaatgtgtagatttataatcataaatacacttggtataggaaaaaaacactcttcatatttgttactatatttagcaatagcctaagcagtacattcagagcatttttaccaagatatcagcctagccatggagagtaactgcttaggaaaatccctctcttgccatttttctcatagttaagtcctgtaaaccagaccctttccctcatctaccacatactggaaaactctatcttaataaaagaaatgttcagtatttcaggttttctgtcacccacttttcatttatttcaggatttcatttttctttcttctgtcacatataatcatactctttaacactttttttccaaaaaaaaaagaaaaaaaagtaaaattcattctcatttttctctcattctccttcttttgctcttactcacatttcattcatcctcttgttcaaatattcattgaaaagatctctataaggcagcttaatacttatccagtatgaggctcgcaccctgtccctgtctaccatcactcctctcaccaaggaatccctttatctttgttcctggaagttcaagtgtacagggtttcctagtcctgtactatggctcaaccagaacgccaggcaaccaaccctggcacagtctaagacttaacatgcgattaaaaagccacttgctttccagccctgctgtacagaagctgccctatgccaccacctttcttggtgccagcatgattcaacttagtgatgtcagcacggacctttcactacccatcccattcttctctccagtatcagtgccttctggttcgtgaacctctgtctgaattaactacattcctgcttatcgggtgttctccagcaccgtgtcctcccagttactgcctgccaatcttgcctctaacttactcccagcctttatattattcattcatattctgcatacaaactattgctatcattcttgctcataactttgctctaaactttactatctggacaagtccctggtgtcccaattattcacatatttccatcatgtacaaaatcagaatcctccttttcctcatattatgttttctctttcctaaactctcaatcacaaatccctgaggccacaaagccctggccccagcctgactggtctatggcattatagacaggcagtcaagatcccaaatccagggagcagagtggcctcaaccacaacagacagcagtaactgagtcaagtaccatatgaaaaagcaagaagaggccacaaataatcttgcaggttctcagagtcgtgcagaattcataagcagtgaatccaggcaggtggtattctagggcagatgagccttcctcatgtggagacgtccattcatgtgacagcactgtcctctccactacaagggtgggtcccaggagcagtgcttcagacagaaatgggaaaatcaaggaaagaacaggaaccaacagaggtctataatcctctataagatcctcgggtggggaggacagcaagcaggtagagctgcaagtgaaatggcagagaagaggcaaggaaagacttggtggtggatttgaactatctcaactacatgtctacattttcagaactgtcttccctgcagcatgccatcatttttgggttataagagccaccctggcgggactcggggcagtagtgaagcacctgccgcatgcatctcacactgggaaggtgcagctcacacacactgtcgcctatgtgcctgctctcctcgctggcacagggaagcggctggtccacgggattgccttcatctgcttattttattcataggccatgacgcgtcttgctcagggaagggtgccagcttctcccacagttccctggcctctctgaagttagaggcttatgatcagtgagggtctatgtggactggcatgtgcccttgtacatccagtgtggccttcctctcctgcgctccactctcatccttccttcccgactgctagccctggtgatttcagctctggcgccaaatatatagaagcaacagccatatataatgtgcttaactagttcctaccatcataggaggtcaagtccttttaagtcccatattcggcacctttcccctcattctgtttctcttttcacaccccaactgatacagaatttggcaccagaactagttccagaaaaacaaaacgttacggattcctccagtttgaagatgaactgtagctgatgctgttttccagaaatgttcactacagtatctccagtcacatgtgctcttccagaatgtttccactctcccatcaaggggtgggggatatgtcccctccttttgaattaatgagcctgtctttataatcacctggatgaacagaatatgggggaaatcacatggcatcacttccaagggtgacacagcttctgcctggtgttatccccccacccaccttccccagtgcgcagctttactgttaaggaagccttggccacatgaaggcgttgcagccaacagactggctgagagccagcactaactggaaaacatgtcgacgagagtcttcatgattgcagtcatccgcctttgaacctcagcagccactgagcagagcaaggagaagccgactccaccaagtcctacccaagtagccacttcaagagcaaaacacatactgcttttgctttaagccactaacctgggatgctctgttttgcagcaatggatgatgaaatcgtggttgtcacaaggtgcccagattccaactctcagttaaaaaggacactcaactctcagttaaaaaggaacacctacccttcaatttgagtgcacatgattgaaaacagggaaagggattactcacggcagaagggtgcaaggccgacaaccagtgattatcacagtgtgcaacattagaaggaggctttaaaccaggctcagggtcccaaaccccagactctgtgtaactaccatcccctttttacttacagtcctggctctaacgactctccatgtgtttgctctcaatcttccagcttctcattgtcaagcggcctttcattttcccctagatgccagctattagcactctaaattaaaggagtcatccctgagatgtgaagctattaaaactgcaaaaggcccctctcacagattttgctccccttagactctctgctgtgtgaagacggatgaaaagaaaaagctatacagaacttttcctcactttgataacaaaaacaatcaaaaaaattcccccagaaaaagttctttgaaatctaaaggatctcactaccctgaaagaggcaacagccctagcctatctgttaatttcaatagatagctgctggctaggtattaactaaactttaaatacagctccggagccacagctgcaagagatacaggatgtcttagtaagtgtatgggttgtaagtaagtgcatgctatcacctcaagagcttttaacgagataaccaaacatgtttcctgaaactagatttcagttttatcagatacgctacaaataacaacattcaaaaacaaaggaaaatttgttaggccaaaaggtctgatgaattctaaaagtagttcatctagctttgaaggcacataaaaccatagtatcaccatgtgaaactgtggtaaacaatctactgtttgcaaaaaattagatatttattagattttttataatgggaaattttaatattatcacttgcttcatttagctgcaaaagtgatttgaatggacttttttcttccaatcacaagaaggaagaaaattatattttgattgacataaatcataatttgcttgactattaatggaattagcaaaatgagaattctttcaaaattcccaaccacatgtttatgacaaaggtaacatgtacctgcaatcacagtcacttacgtttttgaaaacctgtggctggcagagtaatggccccctaaagatgtccatgtcctaatccctgaaatctgttaggttacatggcaaaggggaatgaaagtcacagatggaattaaagttgctaatcacctgaccttaaaataaggagatcatcctggattatctaggataggccaaagtaatcacaatagtccttaaatgtgaaggagggaggtagaaggggagaaccagagagatggcagtaccagaaggacttggcccaaagctgctggagttgaatggaccaaggaacctgagtaggctctagaggccggtaaggaaatggaatcagtcctaggacctccagaagggaatataatcctcccaatactttgagtttagcccagtgagaccattggacttctgaccaccagaactgtaagataaatttgtgtttttttttcaaaaccactaagtttgtggtaatttgttacagtggccatagaaaacaaattaaaagcctttaataaaaataaattcactttcatattaagtgtcttgctctaaaagcacaaatagttgaagcagcatgttaaatatgaataatcaattgattcttaaattggaattttgagaaacttacactccattagactataagatacactgaaaaactgattacgtgtaagacacaaaaaatcacacttcttgagtcaataattattaacattattaaataaaattctttagaaaaagtaagaaattctcacctaacatcagcttaagagaagggaagaagctgccttattaaaataatatacaactgttgatacataaaactatatagatattatacttcaataaatgtttttaataatcaattactatgctgctttaacactataatgttctcagtaagtaaaaaaattttaactaaaatgatatttgaaagacacttgtatcatttttatgatcactcttgaaaatttctggtaaaatataataattactttggtaaggtactctaaatagcttagctgaagaaccactataatcaagtggccagagaatgaaaatgtgtaaacagggaagagaaaaagaagaagggagggagggagcagacgtgggagaggggagagggagaggcagagagaaagtggggggagaggaagtgaggggaagagaggaaattggagagaggagagaagaagtgggagaggagagagaaagtgggggggtagaggaagtgggaggaaagaggaagtgaggggaagagaggaaattggagaggggagagaagaagtgggagaggagagagaaagtgggggggtagatgaagtgggaggaaagaggaagtgggggaagaggaaagaggaactgcagggagagggagggtagagagggaaagagtgagagtgagacaaggaaggagaggaaggtagaaaaagaaataagcctcaacagattctggccgaaatgtaaatctttgacttgtgtttgtcatttcaaatactgtctaaataaagatgtcatttccagagtctcccctctgcttccatggcacagcagtgccccttaggagaagggctcctgtcttccttcattctgccacttccagtagatcccctggaatcattgattatcacacatttatctttaagaagaaatttttcagggcacttttgtgcccaaagaaaaaatacacccttttgcatttgctaagaattttttctaaactaacttttcttggctgctcccatttcttacagtcagtgtcatactggcaactcaaggtctagctcaaatgtcactttaaatgtgaagccttccagaacccacatcccaattccctggctctaataaatatattatggcaccaatcacatacaactgtagaaacttatctgcccatctctgagataatgaagtcttcaaggcagagtctaaatacaatttgtctttctagcccagtgtctaacaaataataaatgctaaatatatgtttgaattgtagtgtttgcaacaccacaggacagaagttgccaacattctgtaagtgaaccaataacatatgccccaactaccacagcatatccaatgttatttcctccaagagaattggcgatgattctattctttatcaacacagagtagaacaatttggaagtccccagtcagaccccaacaccagaagctgccatataagaagaacacctggtacccatcccagcatgctcttcagtcaaaggaaataaaatatacaaatgctggtctaagtagccaattttcctaaagctaaactgactatactgtaaacatgactaacacagcttaaaatgataaaaacagctattttaatgagcactagtaactaccaggcaatatgcaaatgctttagaatttttttctcatttaaccttcacaataattttatggagtaggaactattactgttattgccatatcacagacatggcaactgaaatatacaagcaaagttgaacactggcagaaccaggatggaaaccagacaatctgagtacaaagtcatttttttaaacaccacagcaagttcaatattctccatgtgccccttaaatccatttaaaaggttacttattcaaaatggcaatgtaaaggcatttttacagccttcttttaaaacccactgaaaaagggcaaagcaaataaaaaaataaaaaataaaccctccacctttagtgagagttaaaagtcacaaactcaaattcccaatcaaagcacatctgtcaaatactgtgaaatgtgagaggcaactgggagctgacaaacagctcctcaaacctcaaacaaaacacagaatttcctaaaagtaaaaatcacagttacacaagacctattcaatgaccctttgattacgatagacatcagactaagtgaatacagatcaatttctcagaaagcagagaaagtgttgttgaaagaacaaacacacaggcactgccttttgtggagcctagctccctcatgaaggggttcatgcgctccctcatgacgtggcagaaggaaggaagacaggagcccttcacttaaggggcactgctgtccaatggaagcagagcagactctggaaatgacacccttatttacacagtatttgaaataacaaaatcaagtcaaagatttgcactcactagctcatacccaaatcaccagtgctcctgctgatactgtgctctggcaaacactagccccatataaagataagcgatactcagggagagtccatgagaactgcaggtaaaagcagcaaataccaaaagccagagagaaatgtaagcaagaggccaatgaagaacaatcacaggagaaataacccaagcaaacagatgaggaatttagacaaatatctcttcatagactccaaaaaattaaaataattacacataaaagtttctttaaaaaaaaagttcaaggcagaggtacaagtgtaagttcaggaagtacaagggttcacgtaatacaataacagaaaactaaaagaaacgaaaataagtcgacatagctatgaaatatagccaccttgggaacaaaaaagtaaataatttaactgaaaatatagttttttaaaaagttcaacttgaaagcacactgagtgaaattaaaaagttaaagatgaaggccacagatatggaaaatcaaggagaaacatcacacatattatcagggttactaaagagaagaacaaaatagtgtactttaaataaaattttaaaacttcctgtcataaaaacagactctacttctcagagattaagagcaagatccaagaaaaaatggaacagaatgacaaaaagtaaaacaattgatgaagttcctgaactttcaggtttaaaataaattgttcattagcatcctggacaaaaaaaacaaaacaagaacaagtgaaaagatcagtttgcttcaaacttcacagtgacaccaaatgccagatgacagggaagccatgtctccatatttctgagggaagtaataatactacatagctttgataattacaattaagaatcataaaataaatgtgaataaccttaattttaaaagaatagtaaaacaaaaagaggaaaaagggagtcaggaagaaactttgttaattttcccatctttctaacaaaaagtcaaaagattctgtttcaagttaaattcagtcatttcaaaaaacagaattcaaagtttgggttttttttaattaactgttaataatatcattttggtaaaaggatattaatatgaaattaatctattaggcttaaattcaattcttatttttttcattccatcagaagcaaactaaaaaatattctttgtaagagatgcaaggtataaatatgatcttatttttaaaaaaccgtttctaattatttgtatgtatgtacacagagaagctataaataatgttcaccgaatatgaacagaagatatgaggcacggagatgatggggctttgcatgctttaatggttttaaaatgagcaacgcatcatcttttcaaataatgaagctatttctctccttcaataattccataatctttcccaaatctctgcatatcattttgttcccatttcccagataaataagatacccaacactgaagtgacttgacagtaaaaggagtgacccaattcaagacgatattttaataaatactatgatacacatactagttggtatcattatcaagtctattgatgtggctcaataaaaaaaacttttagtacgattatatatgcctggaaataggatgaatgtaacacgaactaagaaattccaaggcgtgctcaacataacactaatgcagccaaccaagtcttacggatagtagccatgcaccaagtgcatgttagaattaatgacctttgagggcacttcgatttctgaaaatgtctgactttgtgatgtgaaatcatacaatgtcatgaagctctctcacactaaaaaacaaataatatcaataccatgcacacttttagaacttgacagttttaaacctttttcacaagaatgtccttttttcacacccatagcaactcttgaaataggcaggacaggtgttattagttcctctttgcagatgagaaagttaaaattcacaaaggagagggcactggggttccagatcaaacagacagataattgcagagctaaggcctgcctctttttgattccacttttattgtccaggcaactaccctacatacacttacagcagccaatgctaacaatccatttcatttacattaattgcagcttttggagcagctatggctacttagttcaaaatggaagaaaagctggattgctgctattacaatccctctatcctgtgcgaagaaagagccttggaacttggaaaagaaatttaaagcaaccacaagctacacaaccatcactatgaaataaaccctttttgtgtggcatgaaatcgctcacagaaaggcttgctcttgttctcttgatttccaaatgcataaagtaaaagtcaccccactgctaatgctaggtggttaggcagctgttcatcagaggtagtcgcaaagcaaagttttaatgtgaactctgataagctggactaatgtatatgtgggatgggtatgttctgaacacctgctctaagccagctgctgagaagcactgggtaaacatattgaaatggctgggggaaagaaaaatgaagcaaagcaaggagccaggtccacaacaagccaccatattcacagagaggacaactgctgaaatacgctgaagtgtgtatccaccagattttatgctggtatttgtgagcaggaaataatggacaacaggaatctttttagaatttatttgtcgttttctaaaggcagatggtaaagggacaaatccaagtgcaatgaagctgagtaaaggaagtaacttaatgaagtaaagaaaaacttaatgcaaaagttgtgtttgttttttgtttgtttttgtttttgtttttaaggaaagggtggatgaagactgctcctgaaagtaaaactctcagtatggacacaacagaaattttataaatcccaagtaggctatttaaattttagaacctaagcagaaaggcacagcatgatattctgtggctcttggcaggattttgtcaccactggcaaactggaaacgtacaaaacagttgtaaaagccatattcaaatcccttttcaactatggcaatgcagcttccactgctgacattttaaaaacttcgtcttaatattgactttgtcaatgtatttgaaatgtaaaaaaagataaattttcaaactctgcaattttctccctgaatcagactttgttaaaactaacagcatctgattcaagcagacttaaaaacaagcatcaatgtattctctgttcaaacgcatctacaatggataaaatgtatgaaaaatcattttttaaacacacagcagtgaggctgggcacagtcactcacgcctgtaatcccaacacattgggaggccaaggtgggaggatcacttgaggtcagatgttcaagaccagcctggccaacgcggtgaaaccctgtctctactaaaaatacaaaaaattagctaggcaacatggcacgcacctgtaatcccagctacttgggaagctgaggcaggagaatgtttgaacccagaaggcagaggttgcagtaagccgagatcgcgccactgcattccaacctgggtgacagagcgagactccatctcaatgggacaaacacattaaattaaatactcactgctcctttctccttaaagacttttgaattcatgaattatgagctataaggcacaattgttcagaatgaatcacataaattacagtcaatcataatattttcagggtctgtcctcagggtaactagtaacacaatgattctttttgccatcatcttcatttgtcataataaaaattagttacagaacatgacactgccaaaatttataaacttacaaagctaacattgatcttttcaaatataaaaatttaatgacaactgaacaaaaacataaagaaatactatctcaacatcatttctaaaggaaagggataaatacattttgcatgataggtaaagaacatttccatgtttacatagagaaaagtaaatttactacctttgccactctagtcttaaggaatacataaaatttttaactttactgtataaatggaattatcaatggtatgctggagctagctcatcccctgctcatgagagccaattgttgaattttaaggaatcttgcaagccaggtggtaaagccttgaaaccatccataatgggaataattacaccacaggaattgacaaacactacaatcaggcctctcctctcccctccttctcccagagaaccactttactaacacaccactgatccacatgcaaataagtccacagtacagttaatcctcactaagtgaatgcacccacacaggcaacactgaggtcatgaaaaagaacattactgatacctgcagaagtctcccttgaacaatatctgaatcaatatgcctccacaggtctaaacactttacaaatactagaaaggagcaattttagcaatgaggatggaagaaggcaatttaagtgaaagatacaaccttgaaaatcacttgtaagtagctgtgaaggtaggctggcagaaaaagacatagcaagttgtgcattgatttggaagcagcaagagtaatatgggaaggaaaatatgaaattgtattgctgagcagctacatgaggaattatgaggcacatgcttctgtatgagacctgttcagtgtaaaaccctacttacgaaatagagatggtttaacatattgtaattctcttagtgtcacctatgatttttacattgtaaccagtagaaactacaagaaaatctcaactaccacaaataaggtaatacccaccatttgaggactgttgaaattcacagcgccccccccaccaccacactttcattcatactgtatttgtaagaaaccaaatattaaagttttccatgatgatcctacttctaggagaaaagcagagacttcaggggcataggactgcatttgacagcaatcatgcaccatatggcactggtattagaattatgtttgtagaaaactgatgtatattaaaaaaaatctggcttctttttttgtaccagtgatcagttgcatcaagcagttttccattttttaatattcatctgaaagttgattcttaaaataccagcttaagttctggaaaagaattacagctagacttgcaggaaaaaaatgaggagttgcttccatataattttttaaggggctaaaaggaaaaattacattttacagatagatatgcacatgtaagtactgacctctgtctcgtattcacacaagaaggtactctaatgagaataaactgcccaaaagtaatgctcaaagtagcaatattttcaatgcaattttaacatctgactaaccaacctttattgtttttctcttcatatggatattcattcatccatttgttcttagagtcacattgatcctgcaagaaaaacacaaagacaaatgatgagagaaagttctacaacttgatgttattgctcctttggggaaaaaaatacatcttaattctacagttccttaagctcgtgatcatagagctgaggaatatcttttcttcagctatgtgttgttggcttgctcttcagcagccatcaaagggcaaaatgcagtagagggaaaaacaccagctatgacactaggacaagatcctgggcactaaataattaagacctagacaaaaatgagggaggaagggaggaggagaataaaaagaaagggatgcaacagagagagacagctgaggagaaaatggccaagtaaaaaaaaggtttataagtaaatttcctgtataaaagagaagtcccaaatactcaaactggaacccttggcttcattattcttagcaactgagagaatttaaagtaatgtcatttcattgggggaaatgattgtttctttacagttgatacaaatgtgcaaaataatgaatacaaataaattcggtggttccatgtcagccaatacccaagtaactttaaaaaaatgatctaaattaatatatgtcccttcttttaaaaattaaatataaattaaatatttatgtggtttctaaaaggtccaaaatctccaggaccattaggatatcaccaaatcattaaatattattgggctggggagttctrattataatagaccatttgccctatttggatatatcttacaagtcttcctatgtattctctctcagcattatgttacttgcttcagaatttccatttcatgaggcaaattttctttggcattcagttgagccagcttattaggcacagttgactttatttttcatttggaattacactcaagaggggacacaccctggagttctcagcagcgcccattctgtgccaatgtctatgggccgtagcactgggcctggtttcctgtgtatgtttccatacatttgaaaagaactcactcactcataaaggccttaaatgaaatgcagcagagttcacaagctccataggcttgaccagtgaaggaaactggcctttaattttattccagttttaaatatataygtctctcttgctataacaatgtctcaaaacatgtcccctaatatgcactacagcttttaccaggcatgctactaaaaagggaatccaacatttyaatattatagtggcagactaaaaacattctcttgaaattcagagtataattcctctatttaacatgattaaaccataacatggtatcctttgaaatacttaaaaagtcacctaacacacagtgttctcaaagatgttttgtcctttctagtcttcaaaatatatctaatccaatcggttccaacttcttagccgaatgttcaatcaaggtacatcaaaacctggctcattatttttcacagggtagttctataatttttttcatttaatgtgccataggcatgttctcatataaacttaataatgcttaatccaaaaattcataatactccactgagggaatatatcattatttacttcttaacttttgccttataatttgtgacttttattacgaatcacacataaacacccttccgtgtaaatctggtgtgcaccagagtctctgctggtctgaatgatgcctttaagcaaatggaaaggatgcctcctctggacagacacaaagagcctccaatcaggaagaaggcaaggcctgcaagcagagcccaccgcaaactacaaccaccactcccccaggtaacctcatcctacactaccgcacttagctgtaccaatttatattcccactaggagaagacataaggatgaaactgatcagaggtaaattttataaccaaggaaaaagtcagataatgtcaaggttcttacaaacccctgtcttagtcccaaatcttatggcatggctcttcgtggtttgtcataccatctacatttgcaaccttctacaatttaaatttatatttctgtagtttttaaagcatgggacggcctgatacaaaactagtttttgctttccatccaattcaggctcccaagagagtgttcaagattcatctcttgcctttcagcccctcatactttaagtagcacaaatgaaggtaacagatgaggacacagattagagttgagaagacctgtctgtccctagtctcacctctattatcttccggctgtgtgaacttaagcaactcgttcaacctctttgatgcccagttttcttctccaagaagcaaggataataataataataatacctgctttatatacttgcctactctaattgcagtaatgtttatacagcaatctgtaaaatgttaaatgtcatacgtgtaagaattaccactttttaatcaacagcctagatatcgaataggaaataaaaaagatttctctaaatggaggccacatgatagaacagatacatctctaattttattcatgctaaggggcctttagtttttccccccaatccctatcaaaagcaagccatgatataaaataggaaaatggcacatttccaataacagttaatagctcatcaatttccgaattaaatttacttagctctgccaaataggtttctgaaattatccagtaaatcttcccaaagcacagaagttttaaaggccagtggcctcatcaaaatgctcatgacgcatggttttggtcctcattttcctggcttcaaaaatgtttctcaattgtcattaggtgaagaaaagcaaaggattggtcgcttatttcaatatgaaaaacatgaaaaatagcaaggcataaaatattacacttttgaaagtattttaagattacttttaaaccaaaatattgctgcctggaaccatgggtaaatactcatggttttagaggagagactggagaaattccagttacacctgtttctctttagtagctgcaagcaatagagaatgatttttaaattctttcctttctctttttctgtcttgaaatttccacatatgatcactcaagttcctttataactcaaagacagtacaccctggacaacagaagtgaccctggccatagtgaaagtgaatgctatccactttaacaaataagcagctactctgtcacaattacctcagagtacaggcattatattatactacagtaccagattgcttgctcttcatcacatcttaaatgatctattatgttctcagtctttaaaggttagtgtttaatacattttaaatgtattaaaatggacccataagtatacttgttgctagatcctctgagaatccctttatgtatctttaaatagagacagagaaacacactagacatctaactagccagggattccactctctgctcaaaggtaatttagttgctctgtttcgagtgaattgaatggtggtgctgatatagttatcttatttggaattctgtcttctagattcaagtttacaaatcactgcttcattagttatgatcttgtgttttccagcaccgattttaaaaatcaactaataaaggtttacatacatattcaattcagttactgtaatttttaaagccaactagggaagttgacaggcaggctttgtgcatgtcagtctgtgatgttatgtaacaggtccaagtttgccttgctctgcgcatcaaggtttctaccacataagttgcttttcttctacttaaagctatttctgtttcatctgtcacagtgagttatcttgggaactaaaaatatttgaaggttaatctaaatatttctggagataaatgcaaatctaagtgctacgttttcatagctattttgactaaaaatgaaaagtagctaaagacacaaagaagaatgcttgttgctaggtgacaggtgacacctactgtatctcttctgaacttgtacagcatgacacatcttactaccaagaagaggcacttggatttccactggacacacataattctctacagagaagcaaactagagttttttaacacaggacacagttagcaaatcatggctataggaaaagagatgcctctcacaataggagagaatagtacttcactttccatttcaggtacacattttcaagtaaagtccacacatgaaacacatttaactttcacaattcatgattaagcattaaaaagtgataacagacatcacttcaattagggtaggtggagtccataaagaaagcattattctcctataagtatccaatgctcactaaatttagtaacacaaggccatcatagtaaagatctcataagttaaaaaaagaaagcacaaaaagcttctaagatttcctggacatattttataattacacacctactttctagcatatatcccttccttcagacaaaaacccaggcataggccgggcacagtggctcacgcctgtaatcctagtactttgggagacccaggtgggcagatcacgaggtcaggagatcaagaccatcctggctaacatggtgaaaccccatctctactaaaaatacaaaaaaaaaaaaattagccaggcgtggtggcgggcgcctgtagtcccagctactctggaggctgaggcaggagaatggtgtgaacccgtgaggcacagcttgcagtgagccgagatcgctccgctacactccagcctgggcaacagagggagactccatctcaaaaaaacaaaaacaaaaacaaaaaccccaggcacaaagttccaccctctctcctttgactcatcaggcaatccaggtgacaatacggaagtttcaggaactccatcatatccagcatgtcaggatctcacatgaacgaatggcatattccactccatgtgagaaaggctgtgatgccatcatggaaaagatctagctttgaaagccagaaagaaggaacatcagccttaacacttgggagtaatgtgacctggggtaagttgtttccattttacatgctccttttgcccccttgttaaaccggtatcataagccctcctccccactttttttaaagctaagaatattaaaaaagagaatgtgtataccagaatgtctggtatataacgggtattcaagaaatgtcactcctatttctacccccctacatttataatcaagtgcccaaactccttttccacttcagctttcttgaaaactaggaaaagctatgtccgaaacctgatataaagttatacttcctcaatatcaccttcaaccatacttgcttatacgaaggtcctgggatccacagaaaatggaatctccactctaggatctcagagtatagtgttcataattcctccattaagaaaattcaaagatgcaacagccaatggcaataggagaaagatttcagaggtcaataataacccatattcaataaagatccccttggaattctgttcgttgcataagtcgacttaaaatacttcatttataaaactgtcccccatttccagttttatgtttccttgaaattacgcttccacccaaggattcttcactacttaaaatagcagatactactacagaaagtaaaatttaataattaaagtcccacttggagtaaggtatgccccaaagcttgagcagtcacttaagaacagagctcactgaatacacagcccattttcagaaggagaaggtaaagcaaaagcacactgacatggaaattactcttttaatctgttttcagcttccgtttcattacaccccatcattctgtgcacccagagaacaaataagtctttaaaagaaagtaaccatagcaaatgaattaagcatttcttttacatatattgtactcaatataatggtttgaaaagtaatttatgctatgctcagattcaaatgtaattgccattttatcaggactgcatagtcaaaaatctgatttgtactgcaaaggattgacaagatgattaaattttgtctttgtatgtctaatttatgtgatttaaattgtaacaaaatataaacatgtgccatttggacatgcacgtaagtaccataagtactaccacatgtagtactgcattctgccaaaagtaacttggccacacacacatttgcattgccagatgaagaacactcacatctttctcttaatcccatctatcaggaggcatttttaactatcatgctgaagatgttaaaaatctttggggttttgagaggctggtggaaggaagggaagaatagggtgcccatttacccagtaatctccagcactacttgtaaaatgtagctgcgtgatgtatacatagaatgccaaattaaaaatattgaaagcaactgaaaataaaatcaaacacatatttggtaccaattacaaatgcatagttcacacagcctaagaatttctctactacttcacttcaacaggtgttgttggaacacagctaggtacaggacattatggggtaaatagttaaaagttttagatactagagatctatgacacaatcaagaaaaaataagttgctttgctcagtatgcagtatacatatttggctttcctattaattgttgcctgtatgcttgggctgccaatgctaagcaagataaatcctattcaaatgcatagtaaacagtttgcttagtgaataaatttattttctagcccatcacaacaatagttgattaaaatatgttgctcttatccacacttttgaattaattcatgtgaaataaaacaaatatttattaaattgtggtgaaaacattccatcaaactgtgaaacttgagtagaaaaacaaatggtacatgcttaattatggttgacatttaaatgaaatttgcattctcaaaatattttgcgataattagaaaatattagaagacaaagtattttaggaaactttatgttcaatctctttgcacatctgagccaaagaaacttttaacaaaggtagattttataatataatttgaaagatcaatcaaaggacttaatagatttgttttactgacatgttgacatagtggtccagaaatgagacactttatttgatatttttaatgattatcttacaggttgccgagtgccttactgaacaatagctctgactggctgaattcatcaacccaagtttgtgtatttagatatcatctatgtatctccgaatctgctcctcaacacacagctagctgtcataatacataatcaactagtatttctcaacaagcaaattagtagactgtcaaagggattgcttaaccatatgcttctctcattactacataatcccagaaaataaaagtaacatttgtttagaatgacaaattattttcttatttatttacttttttatctttatttatgttttcgagacagggtctcactctgtcatccagactacagtgcagtagcaccatcatggctcactgcagcctcgaccaccccagactcaggtgatcctcctgcctcagcctcttgagtagctgggactacaggctagcgccaccacattcggctaatgttttgtagagacggagttctgccatgttgcttaggctggtctcaaattcccaggctcaagcaacattcttgtctcaggctcccaaagtgctgggattacaggcatgagccactgtacctggtctgactcttactataagaatcaaaaacgactcctttaaaaatggaaaaatactaaaattgaagaaggtcaactcaaccatattctagcaactgctggcaggtaataaaagtcactgatttataatagtgatgcacattacatggcaaacacattctgttatcaattcacacatgaactgcctatatgcaaagaactgagaacatcaacaataatactccatggaacctgacacacagaagctcacagtcaacaaaggtgggctgaatatggataaatgacataattataacactaatatctaccatctcttgaatgttttaccatatggttaacaatgactaggtacttttacatatattatttaattgaattcatggaagaaccatagttattccaggcaagttgaactgatgtccacattttataatgaaagtaagtgattaaagttaacattctgtaattcagattaagatgccatccttagtaacaccatagggagctctggtgaaagaacggagtatagtgggaagtggaaggaaatcagtttagtttcacagaagtgcttacacaaagctgagtcttgaaaaatggggaagacaagacatttcagggaaaagagatggactgggtagtagatttaagtctgaatttgagaataatcatacatgtatgtgaaaatatgcataacttacaaagaatatatgtagagtgagtaccccatgagttaacatattagtcagcccatccaactgaaagagggactctaatgtggaaaagaagcctgttgatatgaaagggggattcatttcaaggaaataataaaagcaattctgaaagtctaacttctgtgtctcaggtgtgtatctgtcttacaatgcaaagggatttattaggcatgctaagtcaggaccactaaaatataatttcaagaattttatgaaaaaatgactaagaattatgtcatgttccacacgattcttgatatttctgacactgctggccaaagatcaaatattgcacagtatttattattcaaatatgaatcaatgaaaatatgcttacagatggtgtttctgcacatgtacacatacacagctaagctctactgaaaatacagacagaagataaaatcctgaagaataagttatgtaagtttcacaaatactccaaaaaattaaataattttgaaaaatattgtagcagccaaggaatgtcaatggcattttcaaaagtaatcccaaaacaaaaactgccccactgcaggcttaaaaacctatttggagacacacacaaaactaatacgttcacaagtgaaatgacatgatcaaataattattgagagtaagcaggttaagggctcacacgtatcccccaataagaatagggaatgtatttttatattttaatttaaatatagtatcattcaaaaaacaccaggttttttaaagaatcctttcagttctctaactttattcccaaaggtggctaaacacatcttgtgagatacaggaaaggaaagccactagccaacaaactgaattaaaattgttcagggtggaatggtatcaaattccagtagtaaaagtagtagtggtgacagcagtcctggcatcagcaaatatttaatatgaatttactatgtgctagcaactgttctaactactctattgtctattaacttgcattaatcctcacaaccttgtgaagcgggtggaattattagtctcattttacagatgtggaaacacagagaagtaacttgcctaacaagcggcaaaggcagaattttgaaacctatagtttggctccagtcttcatgattttaagtactgtaacttaaatgattcttataaataatcttggtataacttcatcatgcaatgcacaacagtgtggtatctttttttgtagaaaatatgcagaaagccaacagcaacaagagagttttggtgttttcccctcaagcagtttaaaataagatatttctaaactaatgacataaactcagatgcttttccaatgaaggaaaagaaaaacatattccaaatctgagattatttgaaatcgtgcccaatattacaataaagccagtattttaagtttctccactaattagaaattaatcctttccttaaatcatttaaggtttgggggatttttcaaagattttaaaatttgtgtgtaaagtctcctacatgaaacttaggattaatgaatgaaaattctctttctcctttcctcaccaatgatatccaaacctgtgcacagacaaaaaaaaaaaagggaatttaactttcacttcacaaatcaactgcattctttgataacgtctttaaaataaaagccaattatgaaaatacatttcaaaaaagtatttctaacctgtgcttgaggctgttaccctaaacaactataaattacataatttgaaaaagtaatttatgcatagttttggcaaaatatttccctcaactcttagattctttgctgattctgaaggtactgctatgaacataatattaaacaatctcaataaggtaaccaaataataaagagcctacatctcattttaaaagctaagcaaataaacttcaacgctgtcaaatagttaacttcctaaaatgattgaaatatagaaaaataaatataaaggaactataaaatctctataatcatatgtactaattctcctttacataattatacataaataaatatccctgcctatcagtgaggattcaaaggtgaaaaaagacatcgtataacatatatttcaaaatttaaaaaggctggcagcggtatgctgcactttggggaagcaccaataaatcaaatctgtgaacagtaggcaccaggtgtgtggtttgacacagttcatctctccatgaagccaggatggaggattaaaataactgcatttcagttcaggaaaaacaagtagatgacaacttactagaaatcgggaatacagctatgaagtattacacatgactctgttcaactttaacatgaaaagcgcagccatacagcatctaaatgaatacaagagccacacaaagggcatggcacatactatttggagatctttataaatggcaatctttgtccaaaacatacaaatttccttcatcacggacggttgctggttgctaacctctataatggtgttattgtatttacccataagcttcaaattacaacatgcttcagtcttcagcttcataagatgctttatactacatactactacttcaagtattctttttaaatgcttttgatctggctcagggtgcttcccttcctgtcaccacatctgggttctcattctatactctcctccagcatagaagtcatctctcctgccttaaaaatattcagatgtttactatacaacactttagttttggctagttctactgcttcatgtagttgcagaacaatttctgtcattgctcagacatgtaatcacaacctattaactattttatccactccctctccgccatggtctctttgatcactgatgtctatttggcattatagataacctgcacctggaaaattctcctccatatttcagtgatttctctgattcttacctctgttctctctaaccattaccatcagatgtcttttgaagattctctctccctacagaggtatcttccaagagcctccctaactttaacacatgctttctctctgtgtttgatctcctaaaagttaaactcttagtgtcgattaccaccaccccaggtaactcccaaaggaacacctttgggcaaaatttcccacttaaatctctactttttgtccacatatatgtatcagtgaacaaatcaaaatacatttatcatcttattgtacgtctggaattacgacagccatggagatttacagccaagactgttcccctatacatgatggcttaccatctagggaaggagacagcagcacttccaagaactcaaaactgaagtcactatttttccctcaatgaactgctttcccctttcagtcagaagtcatcagcaaccagttgcttcaaccttatctttgagtcaatgttaacacccttttctaccattgtataacaaaaatccatccttctctccaaagactctttagattgacttttgcaattttcctttgccacctcatctcctttaggtcctcatttaacaagtctgaacgattgctcatctctagtctctgctctttccaatgcacatgacaaacatacctggctaatgtttgagatatttcatcacgataatcccagtctcaagaatttacattatttttttccagtacgtctcaatttacatttactttcacagcccttctgaagaggaaggggtttcctcctcttcctctgggaggggttccatctctgcctgcagccaaatctctcctgcattatcatctcctcacgtagacacaagtactgaataaaatcaacacagccaactattttttaattaaccttagaatttgtaaataggactgcctttaaaaatctactgtaggcatcacattttgtggtgaaatactgaaagctttacccactgaaatcagaaaaagacagaaatcagaaaaagacaaggatatttttattttttttttttgagatggagtctcgctgcctcccaggttggagtgcagtggcgcgatctcggctcactgcaagctccatcccccccgggttcacgtcattctcctgcctcagtctcagctgggaccacaggcgcccgccaccacgcccggtaatttttttttttgtatttttagtagagacagggtttcaccgtgttcgccaggatggtcccgatctcctgacctcgtgatccgcccgcctcggcctcccagtgtgctgggattacaggcgtgagccaccgcggccggccaagacaagggtatttttcattaccccaatacagctaatgtcggaggttctagcaagtaccataaagcctaaagatataaaataaacattagtttaaaacaaaattgttattattcgtggaaaacataattctgtagcagaaaatatgaagaatagtcacaatattagaattaacatgaatttagtatcatcactgattttcgtatgcagacatacacaaatcaatataccaaaacaaaaaacatttatacctggaaatttaaaaaacaatgaaatgctataaaacaatgagaacaaacaactggtacatggaaaaaaaaaaacgcaatgtgaaataaaattaaaccagttacaaaagtgcacacaatttgagtccattcaaaagactcaaaaacagttaacatcaattgatatgaaatcaaagtaacagttacattgagagagtgacaatgaccagctggaaagggatacaaggggctgactttggggatggtaatgttttaatattttatctgggtggtagttacatggatgtgttcaattctgaacatttactgaggcatatacttatgatttatacaatttttgcactttttatttcactaaaacaaaaactttcctgtaagataaattttgatcagaccaattcctaattttgagtcatactgcccaaattatagagcaatgtccagtatatgcatgagtcactccaaaatcagctaccaccaaggaccaatcaattaataagagagggtacatgagccactcttgtttggaggaggccaagcaactggaaacacatctggtattccatccatctcataaagtcctttacatcagcaacagcttttaatgcaaacaagttatacaatgcattttgtttggggtttctgttgttctttgcaatatgatgaattcttatggctgacgactaaatattatttgattcgctaatgaagattcacaccaaattagatggagaaaacaatttggtcatttttccttaattaaactgcaatactaccattaactactgtatgtgccaattggcaagtcagttaaactttctggtctcagcatcctcatttatgaaattaaggggttgaagatctttgagtctcctttcattaataaagttgtggatcctataaatcctatattttgtacatgcacaagtctgcaagacaactgtaatgagctggaatagattaatattgttaacagaatttgagttctgactctgcactgatgaattcataaaatttaaccaatcttctcattcccagtagctcccaacctgcttcaggcaggaataaaatcgataacttatgtccattgtaaccagcactcctcttctatttactacataccactctgaaaggagattcttaggagatacaaatgaggaccatggagtgaaatattttcactatttcccagctgagcctgtgaatgcaacagtagctgaaggattctccaaagctggccgaggatggatttgtggccttgaggaattctgaaggtgagtagagaggatttcttttctaagcacagttcaataaagcactgcattgtaacagtttatctgtgactgtaaataatctgtttccctactgttttatcacagccacttggaatgctcaggaatctatctgtcactatcttgaaaattttaaaggagtatattacttacaatagtatttcagcagcacaaatgcaattcataaatcaggttatgtgtcaggcagtgtggtaagtactttatacacattatgttaagtaatcttcacggtaaccttgtgaagaaaggatagtaacctccacttacaagtgaagacagttcaacagctattcaaccaaacagctggaatttgaacccattttgtcagttcccaaagtccacactcttttcctcatgccattttgcctctccctgaagcttctggtctgtgagctagatggaagtgctatgccggattgttctgtaggcagcagtcagaatgggttttaggggaacaagagagaaggagagaaacgtggtaatttttgaagaactccagaaacagcatacttctaaacggcttgatttgctggcatgtatggtcctataagtacagtcaataaatgtatatagttaaatatggccagatctcagaagtgctacatgaattgtcactgcagcatttactttgtggatccaagcaaacacaggagagtctcgtgctctcattctcaagttttaaccaggagccactggcagactgactctagctaccatttgggaagcatttctccacaagtagtctgtgactgaaggagtttaaattaaacaaactataacgaagatcttgtttgccagtgtattttacttttatttgcttttacttttattttgagacagggtctcactctatcacccaggctggagtacactggtgagatctcggctcactgcaacctccacctcctgggctcaagcaagcctcccacttgagcctcccaagtagctaggactacaggcatgcaccaccacacctggctgattttttggtagagactgggttttgtcacatggcccaggctggtctcaaactcctgacctcaggtgatccaccctcttcaaccacccaaagcaccaggattacaggcaagcaccaccacgcccagatgttttaatgtaggttttctcaaagacattatgcaagaacaccaccctacacacataccccaaaagtcccaggggcctcagaagttactggaaagcaactcccccacctattttggtaagaccacgaacaataattgcagagttcagaggcaataatgtttccttaaatgactattcccctcctgatgctggatgagatgtggcatgctacaccctacattcaacacccagcttttctgtttccaagttatggcctagccataatttctctaaaatccagttttttcacatccacaaatggcttaatgcctactttgcatcattttgtcatatttggagaatctaaaacatgtaatttgtacaaggcgtttgtagttattattttttcttatttataagtactattttggtttttaaaacacagacctaatcaatactactagatcttagaagctgctcgtgtctaacaaaatcaaaaaaagctgcatgaacctctctgggtagtctataatcttaaattatgctaatttaagaaagcagaaatttagttaataaatacaaccagatttctagaaacatgcattaatgtcacagtctccttttacagagaggcaatagaagactggttcatggtttttcaaagtaatatcatccaagtaaactaaaacatacaaaggaacagatcattctgaaaatccatcatccagcattcctacttatgtagattttttggctttaggtttaaaaatttaatctattccagaattagactttgattttcagtaacttctactctctcctttttattgcctctttaatatcagtgatcttattcccttaattattgggaaatctatatcttgatccttcactatgaactttaatcattcattcactgaatcaacaaatacttaaactccttcctcccctttccaattaaatctctagtgtagttaaaaataaaggaggactcgatttcagaaagcacaagtcagagcaaaaaaaaaaaaaaaaaagccatggaattatgaattggaacagtataaaatttctgttcacagtactgcagaggcaaaatgctagaactgctagtggtgatttcactgaccaccaggcccatgtgtccacagagcatctacatgtagctagtgcaatttaagttgttctacaagtgtgcaatacaaaaataactttaaaaagttcactaaccatttactaatcattttctattgatacacattgaaatgataatattttggatatacagtcggccctctttctctgtgggttctgcatccatggattcaattaactgcagatcaaaaatattcaagaaaaaaagaatttccacaaagatccaaaaagcaaaactcgaatttgccgcagactaagtactacattaaatccatgtgaatgaaacaatgtgtgggcattgtgttgtgaattttaagtaatctagagaatgtaaagtgtatgggaggatacacataggttatatacaaacagtatgccattttatatcagggatttgagcatctgtggattttggcatcagaagagtgtcttttctcccatgaataccaagggacaaacagtactgggttaaataagtattaatatattattttaaatttcaactatgtcttttcactatggtgattaggaactctaaaattcctgaaactgattcagttatgtttctattgaacagtactggtcaaggttccacatttcaaacccttgtatgacacactgggaattttcctggcctttaactgtattttatatagaccttaaaacatccactaaactccccaaagacatgttttcttgtttaatctagcatttaatgcatctggatgtaaatgtatcacatgtactgttaatttagcacaatcttcagccccttggagagctataattgtgcagaatgtatttgatgcttcttggtacctaatttttatctcaccagattatcaacctttagttcttagaaaattctacaaagtgatcccaaaagtgctggatgtgtcttccaaagcacagtcattcgtgcacagccatgtctgaatggaagtgtcaagagctttccataatcctcatagactattaaaacgaaaagagtcccagaggaccagaaatataacccaatatctattcctgagtacactgtttcatgtcctgaagcagggctgcttttttaaattgataaaataaaatgtcacctattttatatcacatccctgctacattgctgatgggaaatgcatgtgacaatatacatgattaaaatgagcacaactaagtatattatgttacagtatcatctggaaactcaggccaagccatcctccaaaattcttaaatgtcaaacctctgacaacattttcattcagttgttatcttactgttgcttctagttatgtttttccttaagcattcttctgagtaaacaaacttgcttagcagttcataattttcataacaggtaaaagtgctgaaagaaatcactgtacacttaagctattttgcagtacttcagttcctttacaactagcagtacttaaaaaacaatcacatattatatctaaccactcatcatttttttcatggagttatacataaagacagtgttttcaaatatatgacctctactaactatccctgccttacttcgatagagcccgttatgggtgagcaaattgccaaactggaccatttttctgaggaaacataagcagctaattcaaatctgtgacatagaaagaatacccgcctggtaaagaacatgtagatttctttcttctatgtctgtggaaggcctttaagagttggcagtcttcaacagctgggtacgaacacaagaaaggcccctcatgggaacggattccctgaacccctaaccttgggacatcctggggaatgccaggctgtgcctgaagttaccaaaaggctaactgggcatctcccaactttattcccatcattctccaagtgtcagagaaaatcactatctcagcatacctataacaacccacagcacttgaatttacttaggcagctacaagtctaaatgctaaaaagagccagggttgagaccgaggtggctagccagacagagtaaggctgaaagtggcagggacaagaaatgcactctctggagagaaccactgctactccactcctgacaagtttgccctacagttatattcaagtgacatgcataatctctgtttctaaaatttgctaattttaaaatatttctgtattaaactcctatagtaacaacaacaacacaaaaacaccatctacatatcagccagttcatgatatgtgttgtaccattctttccttcagattcaaaatatctaggggggcaaagaaattctaaactataaggatcctagatttctctgggcccttgcaaggaggaatatgaactcacataaaaaacatgcagcttctactgaagcatctattttacttgtagggttttttgataatttatattaaaacgaacagtatattatgactatagttcaaaagtcacataaaataaagcaaaaagactcaaattcactgcttgcattaggctactttcttcttcttttcttttttttttttaagagatgaggtctatgttgcccaggctagtcttgaactcctgggctcaaggtatcctcccatctcagccttcagagtagttgggactacaagcatgtgtccccacagctggccaacagcaggctactttcaaacactcacctggaattattttctatttctgaggaagagtttgagaaataggctattgagcataacttgcagggggcaggaaccttttaaactaactctgaaaaaataacattttaaaagattcttccacaatttggagttcttgtcagcacaaggccatttggattgatgattcaaatataacttgtactgtgaaaacgttctagaagggccctggaacactgtatttcagcagttgaggcacaccagcccagtggatagaggacaccccactaccagaatgatagatttgcttattccatgctaatgaagttttcttcttcctatgtcctgcgtttgtttactggtaacgaataaaacattaaaacagccatttagaatataaagcacagtagttcctgcaaatggtaaagttatgctggctgtagtttagggtactaaggctgttatttatagaataaaacccattatcactactcaaatattgaacatgcgtagtttgtattcaaagataaagttgccacaggggactattgatataggaaatatggctggagagatatggaatgcatattaaaatttatatactgaaaagaaagaatgtatttaacaggtatatttaatattccagtagcattgaccgcaattgttaaagttatatatgctgacatttcagttataaccttctattttcagtgccttcgcagttcaatccaaaaattttctgcaggcccaaaagtatgtactttccaaggtctccgtctgtaaagggctttttttgttaatgttcagcagattgaaactttgaaaaccaaaggcaaatttgaatgtgtttttcctcacaggaccaccaaattttgaaatgaataagtaaggatttaacacaatgtttttctaagtaaagctgtgaggttaagagtttgccatggttaattcaatagcaaatggtgaagtcaggaatcaaatccaaggattgtgaatccaaaatctgtgctcataactactacagtttattaccttttcatgatcatagctggatagaggcacatttatatataataaattatatactattagtatacagtagtatgtaatataaacagtagattatatacatctaattgtaaaacaatgctagaaaatgtttactcttctaatctttctagtatcctgcaactcttactattaccatagactgatccatgtctaatttattgctattgtaatccctagtaaacttaaaaggtgtatgtgtaattctttgtgcaatttctgaagtctccactaggttataaatttggtgagcacagggtaccataaggctcactgaactttctaagacctattttcttctaatataaatgatgagtaataacagtgcctgtatcataaactggctaaaggaattaaacgaaataatgcgagtgcttatcacagtgcccagcacataggaaacactcagtaaatgacgattgttatcattgttattattacttttatccaccctagtgcgcccatgagtttcacagggttgggtgcatgagagaatctcagtaaataataaaaagtcttaaaatattcattaatttaagcaacaccccctagatatacttacatacaccctctctttccacaggcatagcaatctctccaacatgaatatttgtacactgttccctctatctttataaaacactattacccaacctaattttaatctggctaactcctactttgcctctaggttctgactccctttcttcccaaggtaggtcttaaactctgagactattacgggactcacttatgctttcattggactctcttcttgcccctaatcatcaaagcatttaacaacaagcattcttaatatcattgtatttgccttaatacaccaccagactgcaaaattccttagccagatactatccttttatcatggtaaaggcattagagatatggacataaaagatggacataacagatgtttactaaacattggtttttaaaaaaagagcaaataagtatgtctattggaataacttttccattattctcatcctccctagcaaatgtctcactggatttaggctttggttcaatttctaaaatgaaccaaaaggaaaatgacagataagcccattaaaaaagaaaaatggaccaaaaacaaacaaaaaatttggataagttcctcccaagagatagccaaatggccatttacatgcgaaagatattcattaatatgaatcattaggaaaatgcacattaaaaccaccaagagacaccaatacacagccattagaatggcaaaaagacaatgtgaagaataaaaacaatacggagtatctggaattccagatttggtttgtttgttttttaagagacaaggtcttgctctgtcacccaggctggagtgcaatggcatgtgatcatagctcagtgaagcctcaaactcctgggctcaagccatcctcccacctcagcctcctaagtagctaggagtacaggcatgtgccaccatgcccagctaattttttaaatttttggtagagacgaggtcttactctgttgcccatactggtcttgacctcctgacctcaagtgttcctcctgccctagcctcccacagtgctgggattacaggtgtaagccaccatgccctgcctctcatgtagcattgacaaatgtctaaatgacacagttacttaggcaaactgtttggcagtgtctactaaaatgaaaatatactccttaagactcagcaattctacttttagaaacatgccctacacttttttgtgtacatggtgcaccaaaaggcacttctagaaaattcacagtgcagattcccaactgctgtaaactggaaacaatccaaatgtctatcatcagtaaaatggatgaataaatctgtggaagctttttgataaactcataatggaatattatacatcaattttaaaattcatatggacccccaaaataatgttgagcagaaaaggccggactcaaaacagcacatgtactcgtggcattcagggacagtcgtctatggtgataggagacagcacagtagttgacacttgtgcaagaggctgctggtaatgttttatgactatctggataaatactgtgtgtatatcttcattttgtgggaactcatccatttgtacatttgtaatatatgcacttccttgagtgaactacactttagtcaaaaagtgaactaaaaatgagcgaataaataagtgccctcaacctaaaaaaaaaaaaaaaaaaaaaaaaaaaaaaaagtcaacacataaggtagttatgtgaacttataagttatgtgaattatctcacaaaaactttatgaagtctgaaatcctcagaaccagacaagtcatttgattctatttgagatcttatcttaatcatatctttaactcttctcttcattgggaaattctattttcatctagttgctgaatacagactacatatacacaggattaacactgccataaaaagctatagtacgttggtaccaactttatcaaaagaggccctccttcctgtcccccccaccccccaaaaaaaaacctttttaagtgatggtacacagcaataacaggatcattatctttttcgttacaaatagaaaaatatgaaggaaaagattttcctgagataagttggcgactgtcaaaaaagacagaaatgatacacacacatctatacatgtatatgtataataatatttatacatatatctaaagcaaacagtctgagttgaaagaaattggccaagctgcagtgaaaggcacagagaagcaggcgccctggcatatcaatgattgtctaaccctccagggatgaactaaagaaaggggaagaaagcattagagcagacagttccagagctgtcaccaaggagcactgtcatctctgctaggctgggagagtacacagggcatgagattattcagtggtgcatgccagctccactctaccttcctcaataatatcatggaagaatgtgataaattaggattggaacaaccaaggccaggagaaaacttttgaaaattcttataattactgcttttttttttttttacttaaaaaaatatacacacgattcagccataataaagagggaaatcctgccatttgtgacaacacagatgaatctgtgtgacattattctaagtgaaataagccaggcacagaaaggcaaatactgcatgatctcactcacatgtggaatcttaaaaagttgatttcattagaagtagagagcagaatggtggttaccagaagctggagtagttggggagatgttggtcaaagaatacatatttgcagttagacaggagaaatacattcaagacatctattgtacagcatactgactttaattattgatatactgtattcttgaaaaatactaagtgacattaaagtgttctctccaaaaaacagtaactatgtgaggtaatgcatttgttaattagctagatttaaccattctacggtgtatatgtacttcaaaacatcatgttgtaaataatacatacaattttatatcagttaaaaaaataaacttgaagaatatatacatacataggtaacatcttcaataaatgaaacttcaatggaattttaccaatttaaattagtaataatgtttctgcacaatgaattattcactaagggggtgctcactactgttgaaaaagtatacaaaataaatctatatatatataatttccacaaggcaaattaacctttggaaatgggccactgttcagatcattcgcaaatgtagtttttactgaacatttctgtctcaatggcaatggtgtttcactccataacgttcaaatatttaggtatcatcctagccttatcatagatgattcagcaaggcctattacactgaaaagaacccatgttttatcttttactgatgaaaacaatcgatatcaggcatgctttattcagctaacagaaattacaaaaactgtgtatgtatttttttaaagcttggaggggaaaaaatttgttttaatttataataacatattagaggtctacatttctggatcaagggtcttcaaatggggactcacaattgaggcaaactaagtcttattttaggaacatttacttacatatacataggtaaataaatcaaaatgttaacttattatgttttaaatacaaatatgcagaaattaggattggtcttgtctactgaagttcaagtttttaagtggttttaccaaagaggattaacactcaaactttcattacaaaactatatctctactcccatactatcaactatccatatgaaaacttcaaactgaaaagagtttaagtaattgaatgtaattccatttcactgtaactctctttggataagcatattcattataaatcaatacaaaattatagaattatcacagagaaagcagtttccatttatgctgttcatgctgaaaatcagatttctctgtcaagaagcttactcataataggtctttttaacttacaagtcccttgcaacaaaaactctaacatcgtatgtttaaataaaagtaggtagcagatcaatataatgttacatctcttgtaattagattaaaatacaatttctccttttcctggaaacatctttttcttgtggaaaatgctcccaattttaacgtttttaagagaataaaaatgtactcctttatttcctcagcaaaagcaaaataaattgtgcagactccaaactgcattgaagccccctggtcttttctttcaggaacctctgtaacagtaacataaactcaagtccatggtccccgtgatcacatgctctcattgctcagggtcatggcctggacattaaatataagtgtcaggcagtcataaaatcttaacaatttcaaaatctttagggatcaaatataaaatgacattatgttgtgaggggactgaaatcccatggcctgtggccatgtcttaaaggtgcttgacaagctgggaaagaaaagaagaaaaacccagtctgccttaaaacaaatcattcctacatggaatttggttataaaaaagactttacatgtctcatatttatattcactaacgtatcttttcatgcaatatatacttcaaaaagcaatttcagaaattgtttaataatatttgggtttttttccaattacacagtgctcgtaaatgaaagcaactcccatataaccaaagcatcttagaaaaagcacgcagtccatgccaaggatagaatcaagctctctcaactctattcaacctatcacagctgtgctgaagaaagaaaacgggtaccctaatcactacagggcaaaccctacaaagatggcagcaacacattaatgatgcctaccacatctcactcaaggtcttagcacgaataggaagcttgacaaaaggcaatgatttagaatgcactctaatttttaaggaagtcagtgttatggccaggatcaggaaaaatgaacccaagacacatgttttctgagatttacaatcaggtagaaatagagaagggcaaggaaataattgtttagacttttccataaaaatatggaatggaaggctgggcgcagtggctcacgtctgtaatcccagcactttgggaggccgaggcgggtggatcacgaggtcaggagattgagaccattctggctaacacagtgaaaccccgtttctactaaaaacacaaaaaaattagccaggcatgatggcgtgtgcctgtagtcccagctactcgggaggctgaggcaggagaatggcgtgaacccgggaggcggagcttgcagtgagtgaagatcacgccactgcactccagcctgggcgacagagccacactccgtctcaaaaaaaaaaaaaaagatggaatgggaaggagacactactgctgaccacttcattcacaattctgaaaaaaggactgacaagtctcatggttttccattaccatcaagatccagacccctcgacgtctgctactacacagctgtgccaaaagcaaattctaccttggagaaaaggtggtttcatgtaaagacggtgaaaaggtggtttcacctaaagaccatgccaagaaaaaggagacgtcaaaagaaaagaaaaaagcattttgaattaaaccaaaaagaatgattggtgtcatgagaaaaatcagtttgatgtgttattaataagttcataaaattgctactcacatcaggaatgatcaggcatttgactcaatagcattactcccacttttctcatcaagaaaaaaaaaagatgccttactataataaatcctatttcattaattctatgttagtctagggcagtaagggtcctggaagttggcagttgattgtaattccatgtttttgagaaactttcagtagaagaggctacaaataggacatgatgttcgtttgtgacgcaggggattctgtaaaatgactgctgtggaagggggaacagggaaaagtttggcagcatagcataatagatccagaggagggttgcatctggctagtacaggcatgggagagctgactgcacacatctctttacaaccccatgactacacttcagtagcttgaaatccatcatagtctgtgtatttacatcaaggaagtcagcaaatgctacaaataagggccttttattcaggaagtcgcttgccagtatgccactggttagttccaaaggacaaatctcactgatagtctcctatcaagaaaatagaagtgctataatctacctcaaaggattgataagcaaattaaataaagcaagagtgcttatcagtagatacacaagaacttcggatagcaatgactatgagtgcttttaagaactgccatcaagcatagatctcagaaccaatcttaaagaatttcaccaatgatgaggtctccctaatgtggtctcaaaacatagtgatggtcatcaggagggtagtaaagcatgtggacaaagcaaggaaatgagtgcaggatgaaggcggctttcattccaagtcatctacatgcaaaagacctgctttaaatctgatctttttgtgtcttagatattctaaatatactgtcattatgaaggaaatggcaacaatactagatattagtcactagtacagcatcagaggtattaacaacatatctcttagtcaataacaccacaggcacaacccaaatgacaagtctacaaagtacaaggcagactgcaagatggagaaataggagcttcttggaaataatcacataatacgggggcaacattcactgcaaacagaatttcagaaaaaaacataattatacagacatttttatgtcctgcacaaaaattatctgtacttatgtctatacacacacattaagtcccctctgtacaggctcaatggattatacacaactgaaacagccaccagtggccacagtctcccacttctgccacatggcatttttcaaattttgtctcccacttctgccacatggcatttttcaaattttttcctctcactgggtatcccctcacatctatacttttgcaaccttacactttcattctcatttccttcatgtgggcccaagacaggttttcccacagaacatgcaatggtgcagaaaataggagggaaaagggtaaatccaaaaaaaaaaaaaaaattgaccccctctcaccccacctgcagccacctgcacccacctgcagtgaccactccaacccccccaacatataacgtattggccgcctcctttgaagatgtctgggaaggccttgaattatgaaaaagaaagaacacagtacagaagaaggtattttgtcatgctgagatctcatccatccatccactgtggaaaaaaaaaaaaaatcaccgggagcttcaaaactctcttcgacctaactctctgcatccctaaccaaatggcaggctgcatccctaacctctggtgttggggctcacgcatcagtaagtttcagaagccaacaaactgattctaatgtgcacctggctagttcttactcttccctctgcactagtgattctctgctctagctgcatattccaagattcccttgggaagttttaaaacatacagatgcccaggccctacccttaacccaccagattagaacctctggggatgggatcctagtatggaatagctttcccataaaatgccaaactgaagtgatggttgaaaatgaatgttcttcacctacagatgtttggttttgtttttgagaattttcgagaacgttaaaaattacttacatgtttgctaaaaaacagacttacaggggagaaactcagagaccgtgttcttctctacttattggcaggtgtattagtttcctagggctgcagtaaggaagtagcacatgccaggtggcttttaagaacagaaatctactctctcacagttatggaggctgaaattccaaaatcaagttgttggtagggccacgttctctctgaagcctgtagagcagaatctgttccatgcctttctctgagtttctggtggttccaataatcgctggtattccttggcctgtaaatatatcactccaatctctgcctctgtgacatggtgctctccctatgtgtgtgtcttcttagaaggacacagccatattggattaaaggccactctactctaggatgacctcatcttaattcattacattggcaacaactctaattccaaatgagatcacattctgaggtcccaaaaaggacatgaattttgtggggacactaacccaggaactaactagcaggaaagggggctgatagctactatggccagagcatcagctgttcattgtgaagaggtagcagattaagcaagtttctggtgatcttgaagaaaaggggcatgtgaaatacagctagggttaagacagttcctaagagatcaaagtgcaaagagattccaacccctaacagttttatcaccaccagtgcactggagccccactgcaactcctagcctctgaaatatcaagttgtgtatggcttataactttcaaatccatatttatactgtcagagctacagcaatgcccctaaaaattcatacgaaaactcaaaacattttccaatagatacactgtcatatacagggttatcacataatggcagtaccatattctaatttgggggatactgtagaagaaataagctttgtggaattaaccacacctcacagacagatacataatcatcaactatatttcaggagaaaatacattctcaattccaacttcatgctctaacaaatatccaacaaaatagtaaattctccatggcttaccagcttagttgcccatctaatggtttatgtatttgattgtactcactatatagttaatacagaacatttgtttccaatttaaaaaatgagtatacgcatcattctgtcatgctcaagaacttatttttgatacactaagagcccttaacagtaacagcagcaatcagctggaccactgccgagagagggcaggcatgcacacacaatgaacacgtggagtgaaaatatttttcaccaaaatagtaattccataggtacaaattagttaggccactgatatttgtgtcttcttcagcttcaagtatcctataaaataattgacaatattaacgagtctgtattattcatttaaatattactttaagagagataggcaacatcatttgtggaagccacattttgtttctatatatgcaaatgcacttgagggggaaaaagtctctctaaaacataggaaattaggagaaactccaagtaatctaacagattttcacttatttcagctttaatatacttcaaatatttgatactctacagaaaccacccacctcttccctgacacttttcaaactttaaccacccactgttttcctaactatgttaagttctcaacataaataagccaatggaatctccctttataaccagctcagagagaaaaaaaatctcttctatttactaagctgacaggtactttgatctctcacagactcattcaggtaacaatgtacatatgacagagtttaaagaaagcaaactcctttggaaatttaaagtgtcttagaagtcatgaacaaatgcaaataaactgaaaatgcaaaggggctgtatctctatcacttgcctttgcttactttgtttgacagctatgtttcaaagtgcaagcaaggaaataaatccttcaatttggctgtgatacttggaaagaagcttaaagcagtttaataacagcagtaagattaaaccataattctacaaaaaaaaaaaaaatccaaaaggtggcaaaaggaagtgcctttatgcaaatgtcattgcttcccaactacttctattttctaagggaagaagtctctgttgctaatcgactcataaagtgtctgaatatatctgatgctcactactgctatagcttcaaggtcattttaaggttcttagtttcgctacaagtgggttgtgaacattagtgagttacacatgttggacactttggtttgttcagagttaaaaaaaaaaaaaagaaaatcagtgagtagtctaaacagatgcaagagttctggcactccactgcataggacataatcatcatttactaacatatactgaggtaagaaaggtacccaagggaatttagaactgtccaggtttatatactgcctttttataaacagtcactgtcgtaaatataatgtagattatattgatgaataaagtaaatgaaacacatttgactgactggatgacattaccaaatgactgcagatatagctaaatgatgagcccaggtagatacaaaggcatcttaacttcctccgacttgacaactgtcagataaccacctctctagagtccccataacaggctgaaaacattatttggtaaaatgcaaacaattaaataatttggatttgctaagatttctctagtgaaacagttgagttttgggtaccctaactcacaaacttgacattattaatcatcataatttatgccaattatggatacaatgtgaaatgtcaatttcctatttttattataaagatcgattgcacatggattgcaaattcattacatgaaaaaattaactcaagattttgaagaaaaaaaaaaaaaacctttaccttggaggaaaactgggttcaaaaacttagcaatacttcaagtaccaaaatatatgtgtagaaaaataaagagggatggaagaggaaaaaaatcagttatttcatttccaaaaaagtgaaatatctgcaaatcaacctctttttagttgcatgcttctctaatagaactgtatgtaattcctttatgtaaagcctaacttatatagtgaaaaaacatcaccttgtattatacatttaaaaatggttaaactaaaattttaagttgtatttcacaatttaaaaagaaaattaaaatagtgatatttaaggttcttctattacaaaataaggaaggaacagttttcatctttgtaagttacatatgcatgcacatatttccatgttagatacagttacatgacaatatataatgttttaaaaagggttaaaatagtacatttctgttacatgtattttactataattaaaaacaacaaatacctgatttggattcaaatatcagtatcattcaccttgatttctatccagggtaatctgaaaaacatcgattctaaccttctgtaatttgtgttctagaatctacttacatcaatctttaaattttttgaccactctacctcagtcccacaggagaccaaaaggtaggaaaaagattccagggccccatttgtgcttcaagtcgatcagctagtcccacggtgaagtcaggtgccctgatacagcttttcaggtcttttcctgtgtgaatcaccacctagaaaagtcaggggcctgcctttggtttctaacaggaaatggtgccactgaagtgcaaattcacacggtggggaagctgcagggctggagcaacagcagagcagaaagagccagcaagttagacagtgtttctcttaaaaatagagtagaataaagaagcagaatagaaaagaacaatgggaaagagatgcagaattagtttgacctaaaatacgaatcaactgcttatcaataagccttaaaaaacaacctaccttacagcttgcctgagaatttgtgaagaaatacgaaggcaatgagaactcaaagtgtaaagctacttctttcatatctccatgtcttcttctctaactgtcttcttttctctgtagttctcacacttccccctctcccttttttcatcatctaattctacagctcaaagaaatccccccacttcgcgatgtctgttcattcaacatgcatacattttgtcttgggagcggggggagaggggtaggtatgagtggcatatataattgtttttaaaatactagggtctgttctataaatgaagcaaaagcaagctaaggaggaagacagagtatagtcacctttaatagtaaaactcaattaggctttaacagtaaaactgaagataaaggttccactcaggctatttataaatacccttaaaaccaaaaacagtggtttctaattctacatgtagtgacttgggcttcagatacttaagagtttaaagtagatggcacattaagaaatcagcaattgaatctacaagatggaaatacattttaaagttttttggcctcttttttcttttttacttcaaaaactttaaaattttcccataagagtttcaattgtgaccatacacattcttcacataaaaagtcaacaagatgcattaaagagtctttttaatttagtttcaacgtgtgctttattataactgtactaccaattccaaattatttcatcacgattacccactttaatccaaaacagtatgtcaacaattatttctgtcccttgtaaagaaagaagaagaaaaaaatgagatatcacttaacattgattgaattggccaatttaatagccattatatccattgctagaaagtggcaggaagaaccttatttataggttgcctctggcaataccaactatcagaactcctttgaaaggcactttcctttcaagagtcaaaagcacgttgatagtctttgacccagtgataacattcctagattaatcctacaacaacaaaaaaaggaaaaactgtaagtataaaaagtgcatggaaacacgatttataatctaaaaactggaaataatttattacgaggaaatagctgatttaattatggttgaaaactgtaatggactagcatgctgctattataaactacatttaagaaaaatggaaaaaagagcttattttgcaatattaagttaaaatgacctgcgtatgcagaataattagtaaagtatacaaaaacttctatcaagtaaatgtggtggtttcactagaaatatttagcttaatttgtattactgtcataatttcataacgtttttctaagtacttatagctacaatatatatacatattttataatccctaatatttttaaacattaaagtagattccaaatggcaatatttattgaaagactataaggattagtaaggtcatatctagaagttctcttactatgataaatataagaaacatggctcttatgaggaaaatgcttcaagttttaaaatgtttacattagtaagattttataatgcatctaggtgcagcagagagttacaatgtgtaagagaaggaagacaagggaatcacatcattttataagtttaaattaatataagaaaaagagaaagaattttcaatttttttaaaggggcataccttatatgatcaattaaaaagatctagagaaatagcagtaaaaacatatgatattaaaaaaggtttgcagttatcactattaatagttaatatttaccattgagtactaacttccagatgccctgccagatagtttacatagttcccttttacataattctcagtaccacattaccaagtaggtaattttggtaaccgtttattttataaatgaggaaagtgaatctcaagttaaaaacataacttgcccaaaagattacatggaggatatctaatcaataataaacagtgggactaagaccaaccaagtaccgatcctctattgcctaccattcccaaataccagtctttaaaaagaaagggatttataaatcatataaaaccagcacttttatttctatttcttcatataaatgttctagatctgcttttcctcagttgtttttttatctgttgttgaaatgcaggatttgttaaagtatatgtcaagaaaatttcaccatgattggtcaactacttagttttcaacgtttcccattaaatgtttccaagtaaattaaaattttaagtttaagatcataaaattggtacaggcatgttatctggtcatatttctatttaagtcagacttaactacaccaggaataatttggtagaatatactggatcacataaatctttacggttctctgtagtgtttaagtcaccagtgatttctaaggtaagtatttaggaaccctattaacgggtttaggcatccagggtacctagtatcactcttacagtttgttcccaggcatttctcaacaagtctcattctatacatcaggataagtctggcccctagaaaggaccttgctttctagcataaataacacctaaggacctcctaggcagttagctcccttcctaaatcaaatgtttggttccctatgagttaagtttcataacttaatctcctaagaacactgcttatcaaatcttacctctgacctatagttaagtgcatatccagagccaggcacaaggaagctgaagtgaaaaagtatggaaaggaaggagagttgaggccacaggaagagcctgattcactccacagatgcctctaaattacttaaagttctgtattttcttataagtatatgtgaatttcctccataaaactccacagtagatcatttcatagcacattaaaaaatttttaagtgactatttgtcttgaattatctgagaacactgatagccaaatataaaagtcaaaatgtccttagagatttgaacctccaggctaaaataaaagtcatggataggaatggagtgggagcatattttgttttagccagtatggtagccaggactcactagaagaaaacaaatgagaagattaccaaaaacagagcccattgacaatagagagactacctctttcggacaaagcaaagaacagtcaggaaagaagctgttagagaagagcagagcaggagcacacactctgcccaatgttacacgttattgcctctcttttcctattcctgattcagactctgtgtctattactgccaatatatggtcattagacatcaacttctttcattagaaaagaggatatttcaccctaccttaagatgggccttaattaaatttctaaatacctagatgaagatgtctgaacacctctactgtttcagaaaaaaaccttcctgtcctttcctcccacgctctctctcattttggcccccatccaagagaaaataattatatggcacagataatatttaagccaattagtatcacttcttagaagcctatagcaaacaataaaggatgcatttatatgttaatacaagccacaaaagtagcattctgccatgttcctatttcatttcagggtgacatttaagatagcatcttacttcacaagatttagctcattacaatcacaaattttgactcttgatgtacccccttgacatgaggaaactgtcaaggtaaagatcttgactaatatcagaggtagaaacaagtggttaaactaagactcaagctataatttctctaatcctaaacttcattttgaacggctgcactatactgaagattattaaagtctacttcctactctttataatatctacaaggtactatatatttttaaaatacaaatatgcacaaggcactgtgctatatctcgaactacaaagattatataaacagtccaagactcagtagattcacagactcagccatttgctatttcttctagatggaaaccttccttggaccatcaaagcccatctttttgctctttggaaatttggaaattctccataatgtcttccttgactaagtctcctctagcaatactattgactttatatgtgatttaaaattcattcatgcaatttcttgtgattggatggcttcataaattagatttacactcaacaaacagactgtgtcttctgctttgttctgaattaccagttctaccaacaatatgctatatgttgagtgaagtagacaaaatcagtttgacaagggggcaatctcaggtacacagaactagataaatcttaactctaggtttatgagaaattatcatcatgtctcttttattttatttagaggaggtgtatgttactggtaataacttaactctttggtagggcactacttcaaattttaaaaagatgtgatttaaatcattactattaaagagatgtaatcttgtaccaaaccagactttttttatatgtaccgttaacataccgccttcttccatctacaagcagtgcattataaaacaactcaaataactaaaatagttaatatcatgatagatattccatgttgcatagattaaaagataaagttacttgaaagattaaattaacttatgatttagtgttccacgtgattcttttccaacaaatacaaatctgaaaaaaaatgtgcttctcaattttcattcagttataaatatgtatttcaaagatgcaataggctactctaaatgtcgggctaagcaactaattaggtcttcatcttcctctctctattaattattttaggtaaataggaataatctcatttgggaattattataagagaaattccttcactgaggtgggaagctaggctacaccatgtccaaagccccacccaaggcagagtttcttaattaagaactctgttcacaagcgtacagaggcctcctcacactaatcaagttcatcatttttcacgtaaaaatccatggaatgttgttggtgcactataaaaatacagtttggaaagtgaaaataaaacctacgatatgtagtaggagcttccaaatctgttaggcacagacttgatcataggactctccttaacatttctaacagaaactgaagaagaacttgtagtaaaccaatataataactaagccttgtagaaggccttcaaatactttcttatatgtatctagataattgcatctagatacatttatgtagccgcataaatgcttcacagtgggagctctccatagtctggtctcactttactttaattcctatgtcttcaggaaaaccagccaaaaccttactgaactgtacatttccaagctgctcattcttgtatctgctacttgctcaggctattttgcctacagaacgtgttctactttcagtcactacctacccagcgttcagtgtcaactcaacgcttgctttctccatgtatcttctctatgacacatgagtattattcaaccttaaccatcttatatacaaccccattctcatgacccaggcctctctctatattttcatctgaactttgtaatttaccacctgatcatataactatcttaaatacagattacctcttcctgaagttttgtatctacacctacagcattaattctacatcttatacttcttctttgctgctggcagtgcttggtattcagtaaatacttgatggctgaccaataaaaagaaaatcacctctatactaatattttaattttccaaaaagtatttaaaattttaaacagaaatatgtgtttaatgttcaattgcttttattctttaaaactccatttctctgtatctaccctaacagctacctccacaaacgtcacttactaatttcctaataatgccccatgggtgttataaaaaatgccaattaaatatgctatttctttttctccatcttttcctcttgaaataaaacgtgacatgtactgtatacaaattaaaaccagtgctgcctgcccttcttatataataaaaacattaagaaatgaaaacaccattgcttttatttcctcttaagaaaagtacaggctaaaactctcagactctgcaaaaagtataaataagaaagttgagatcccttgaagttctacaactaacaggatacattgttactctatttggtgtatgcccttttattatacatgcacatacacaaatgtacaaattctgaagctgatccttaaaacctggctccacacttccaactggtgtgacctggagttatttagccccctgttatttctgttaactaatctataagatagggctaataatatttactcaaaggaatgttataattaaatgagataatcaacataaagcacttagcctagtatctaacacacaagtgttcaacatgttactatagatccttgacacaaatgctattttgtaatctacttcctagattacttaatatttcatagacaaacttccatagcaaagaattcaaaaagacttttgttttgaatggcagcttagtgttccttctatcaatgtgccacatttatgtaactatctccctattacacattttgattgcttcgcaacttttaattataataatctgatgagaataattgtagctaaatctttacacatactcataattatatttttggaatatattcctagaagtaaaatttctgggtcatagggtaatcagattataaatggttaggcatacagaaagtatacattcacacgtttcatcagtgcatatatatgtgtagttattacagtttcttccatatggccatctttttaatcttacccaagctgaaagccaaaaaaaaaaaaaggcactgttttaatttatatttcttggactaccagtgacattaaacatcaactcatctgtttactggtcatttacgcattcactttttttgttttgttttgtttttgttttttgagacagagtctcgctctgtcacccaggctttagtgcaatgacgggatctcagctcactgcaacctctgcctcccaggttcaagcaattttcctgcctcagcctcccaagtagctgggattagaggcacccaccaccatgcctggcgaattttttgtattttttttttagtagagatgggttttcgccatgttggccaggctggtcttgaactccttacctcaggtgattcacctgccttggcctcccaaagtgctgggattacaggcatgagccaccacacccggcccatttatgcattctcttgtgaaatcccagttcaaatattttcccatctttatattgggcagctgctgccttactttatttaagaggtttcttcatgaaaaatattttcactgtcatatatgttgtaaatggtttttaccactttatagttcgccatttaaactgacaaaacttttattataaaagtgtttgaagtagtcaaattccaacttacaatttctagatttggagtcaccattcagaaagttcttctctattccagatttacaaagatattcacttaaatcctattttagtaccttttgtctattactctgattcgggttttatgaagcaaagtattagggagatacatctgaaatcttagagcattatttctgaaaatatctcaggttggacaaagcataatgcctaggcaaactgctgtattaagatgctatagaagaggatttgtctaagcttccaaggtagaatactataaaaaggcccatcatatacactggcttaatagctgtcactatttttagcaattaatttttatcccaacccatatacctctgttctgatttccaggcctttttatcccatagcttacctcacatctgtagtcaaatattacttcctcaagggaacacagcctcaccagtttcctgttatatgctagcctagaatttttccctttattcaacagcagctctcgggtggaagtgatacatatatacagtaatccctcagtatttgcggttattggttctaggactcccaccacaaatcaaaatccaaagatgcttgagcccattatgtaaaacagtagcatgtagtatttgcatataacctatgcatatcctcccatatactttaaatcatctctagattacatataatgcctaatacaatgcagatgctacatacatagttgtgctgtatttttaaatttatgttgtctttcttttaatattttcaatttcggttggtggaatttgtggatgagaaacccttggaaacagagggttgactcaatttatattaatgtggttatctgcaccactgcaagaatgatgattatttttgatccccattgcaggagctggcatccaaataggtgctcgataaatatgtctcaaaagaaaggaggaagaaaaattcatagtacatttttttgttttgttctcatttgtttgtttttaaatgtgatgtctgaatgaagccaaacaaaaagctggtactacccagttctttagaagtaatctttctctcacaaatttttagaaaagctgaagagaatcataatcattctaaaaattcatttctgaggggttgaaaggggaatgaatttttcatcctaaaatgatctgctgtcatttcatatccttaaaaatgggtaagtatcagcatctcttcagacgctcttcagttttaaattgtacacaaatttttaaaattttgatttctaagactggtaatttgagagtaacaattcaaatctctataggattttgcaatttagaaagcttttttacttttctataaacattttatttactattcataactttaatgtgacatgggagttaatagggaagaacctcatcttaaattaacaggtctagtggtagaaggacttgaacccaggatgtctgaccggtccagtgcactcattaaccagccagccacggccacatccccagctcctgcctcagaatgctcctatacactcctatccgcaaggcctagcattcatcagctccttgtgaaccatctgacaccacccactctctaagtcttcacagattttcctcagaccatttccatactttcaacaatgtatcctctccatacttaaatattccatggcctattttgcattgctggtaaatctccttttctcccacttgcagataaatcctctgaagagactcttagttcttcaaagaacgaccttaacttcccacggtacctaatataagagttaaaaattgattgttaataaactggaacagggaggctatgtaccaaaaaaatgaaaaacaagctatttttaaaggccttgcctgacactcacccagactcattgtccccacgcccacccacaggctcccagatccccacacagtgcacgcacaaacacatgaacaccaccagcaggaacacagcattcccaagaaggtttttcaacctgaggatgtggtaagatttttctatccagatgacagaggagtgtggcctggaggcttttctttgcaaaacaggtttttcttgctggcttctgccctaacagacattcactttgcatatccctgtggtgggacaggaggcagggtagaaaaagaagtcagcagaagatggtgatgaaattcccaaggaagttccattaacctgatcttccagcacaatgaaatgtgaaagaataagacagggaagaggatgtagaaaaagtgccttctgttttatgccaacaagacagctctcattttgataaatttataaaccaagtgtaaacttgaccatgttgtctgtttttatcttggtcacataagcgtaaaagattttcttttgggccaggagccgtggctcacgcctgtaatcccagcactttgggaggccgaggcaggtggatcacgaggtcaggagttcaagaccagcctggccaagatggtgaaaccccgtctctactgaaaataaaaaaattagccaggcatggtggtgggcgcctgtaatctcagctattcgggaggctgaggcagagaactgcttgaacctgggaggcggaggttgcagtgagccgagatcacgccattgcactccagccaaggcaacagagcaagactccgtctccaaaaaaaaaaaaaaaaaaacttttctttctggaaaatgtgaactatttcctgaaagaaaaacatacaaaagcacctgttttttcccttctagatcagaagtttccaccttgcttacataaacatggatcactgtatctgcaacccagcctgcagtatgtcggaagggacggattcccttacaatacacactcacccatttagaccccccatgcctaccacatgcatccatctttacaacctcaattatgcacaagacatccacagccgccaattaaaccgtgttgaacactccaattcattgcgtatgagcctgcaaattttttttgctcacagaagcattttctaagatgcacttgtcaatttttagctcattaatactgtggatcccaatttttagcattctacttaagttttgcaacttgatacattttctggataatgaacacaacatgtggtctctaagttctgattaataggagtggactcccattatgataatgttgacaattcattactctaggaaagccaactttaagataatttttttaaacagaaaatgtgtaaactgatcatggatgagggatgatctgtggactgggcaatgaatacagataaaatcactgctgctgtctcttaataacagaaacatcttatagttcttcatgccatagttaatgcagaagctaatgtaaagcacaaggtcaggatgattaaaatcctgttatgaggggtcagggttagctacaaaacagtagcacaggaagccttgtgggcatggaaccccacatacacaagatctgttatcttgattctggtggtagccatgcaaatcaatacatgtgataaaactgcctagaactgatacaaaggacacacaaatgagtgcatgtaaagtcagtgatcctgaagaagatctgtggattataccaatgtcaatttcttagttttggcactgtattacgtcatgtaagatgctaccagtggggaaaactggtagggaggagacaaggaatctcctgtgtctgaggaatgggagggggaattcctgtgaacttataactattcaaaataattttttcaaaaaggctgtcagttgcaaacactgttagacatacatgcattcagtcaatcatgtattcattcaaccaacatttattaaccacatactgctgcctagcattgctctacatgctggggctacagacacaacatgatatgatctttgatctggaagaactcacagcctggtcatccacgacaaaaagcagtgcaggagggaagagaaggtacaatcgtactcgacatggagaacagacagacatgaacacctgaagttgatccatatatattatagtccagctccacattaaagcaaatgtatttgtcaatcaccattccattcacaaatgactataaacgactagtataaaatgaacatattaacctaaggttcccatcattaaaatatcaaccctgtggagaaatttttgctgaagttatttctaacttcaggacaaagaaatgttcagttaaagtaagttgactgcttttgtaagaaagggggttgtgtttgacttcaaaagctcagtatttcttttaaattcctttttaagatacatctttggaaatgttattaaaattgttcaagctaaatttacagcttagtttaaaacatgtaaaacttagggacgataacatcccaggggaaaaaaaaatgctttatgctattagaatttgaatatctataactagcaaaaaaaaaattaacctcgaatagccattactatttttttaatacagctatggattcactttgcacaatatgtgtgttcctggaaaggttttgtaaaagcagacgatttcattttaaattcattttaaattaatattttatttacgcatttttttcctttgcttctaattaatttcaattaacagtatcctggtattttaatttattagtctctctgccaagttggtctaatcagatctttgggttccctatcctaacattacatctgaaaaatgctacattaagacaatataattctcagctgggcacagtggctcttacctgtaatcttagtactttgagaggctgaagcaggaggagtgcttgagttcagtttgagaccagcctgggcaacacagcaagaccccatctctaccaaaagaaaaaatagccaggcaagttggcatatgcccgtagtcccagctacttgggaagctgagatggaaggactgcttgagccaggtgaagccagtgagcttttcagtctcacaccaccatactccagcctgggcaacacaacgagaccccatctccaaagaaataaaaaataaaaatacataaaaagtttaaaaactaaaaagaaaaacataattctgtaaaaaattataaaataatttttatttaatgatattgtgctttggccttaaagatttattacaaaatggacagtacttctggaaatagggggaaataaaaaatgaaatatcaatgttatatttcaaaagcgtaatacaattaggataaagatagaaattcttcacacatctttagcctcagcttggatgagtgctgcattcaagatgacagacacaaaagatggtaatgctgactccactaaactgttgtctgacacataacactgtcctgtcatgcctcaattttcacacatgagctattgctcaaaattcagtataaaatagtgacttacggctgtcaatgtaaaaagtatggcttgctcgaacaccaactcatggatgtcaaagaccaagtgtggttagtagacaatctagatgaaagtattcaactgtgggtttaatgcattaaaatatataaatggtaaatcacatatataggaccctttcttcaaattttccctaataaatggccactacattatctttcaaaacttatctgttaattcaaaatctgtatatcacagggttattaataaacaggacagatgtgatagccacagactaagggaaaaacacattatcacttcatttatatttttttagtctaacatgtatcaggcataatgccaggtgctagggattcaacagtcacagacagacaggattcatgccatcaaggagggcatctatgaggaagagaaaaagtgtgctcgtgctgctggtctatggaatacggtactgtgctatgcagaccaggcaccactcctgacgactgacacccctagtggatgcactggccatctgcagccccggcctgggacattgggattccagaagacctggggagcctccattgtatcaagaacagtttcaggaatgaaaaagacttccagtataaaaaactcagtgccaacatcagaatgcctacaaattctcaccttttccattttcaaacaacttgagactgactaaaaggttcttggaaaaactcacttagacacaatgaatgcattacacaggaaagctgttaacaggcattttctccatgattcctttagggagtcatcccctctgcttaaatacacaccctacatataatatagtcatacaaaacagtattcccgaagctgaggaagtcaaaaatgttcataacaactctcacaataatccttgcctctgcaaagcaggccagaatgaaaaccagcttttctgatttccatctgccctctccaaagctcaacttaaaagcttgacatcatctttgacccctccttcacccagacctttcccattctattagttgccaagtcctacaagttctatctgagaaaacctctcaaactgatcccttcttgtccatttgcattgccgcaacagttgtctagggtgacaataaataaacccacaatacaaccccaaataacatctccaaaattctttctccccacaaagatatcttagctgacaaccacactagactacttatacacacctttcctccttagcactccgctcacatcactccttccacctcaaatacctcacagaaatcccacctccttcacatcctagctttaaagcaacttcttcagaaaaagcatgcccatattatctaccatctctgaatccccacaatattttgcaccattcatgtgccctgtagtatagtttctcatgtaggtatttattatggaagtatttatatatcaaaagactggctttgtcccacacagttcagggatgagttttatttctctttttgtgattactgtccttcagataagacacggctcacaggatgagattaataaatatttatcaaatgaaactggcttccaacattcatgttaagatgctgacttactctcaaattcaagcattgtgtaagtagagctaaaattttgataagtgggaggatgggggcttttaagagttcaatttgctgcagcaactcttccttcttaaaactcatcaaaatcaccagcatccacggctcagcgtaatgaaagagaaattaaaaatcaaagatatagctatgaaattccccagatcgctgatttacacacacacacacacacacacacacacacacacacacacaccccttcaaaacagaaaagaaaacactcagggcagaatagcaaagttttcagagcaatctcctgagtcagaatgctttggtctaatatttcctctactacattattgtgtgaaggtattcaagctatataaataccctgctccttaatttcatctacaaaatgaagatcataattcatataaacatctaaaaaatataagtgctaaataagtgctatacaagtgtttgctattaacattttctgtaatgtatagtttagtcataacttcagtatgaagaaggggttatcggctgggtgtagtggctcacgcctgtaatcccagcactttaggaggctgaggtgggtggatcactttaggtgaggagttcaagaccagcctgcccaacatggtaaaaccccatctccactaaaaatacaaaagttagctgggcatagtggcaggcacctgtaatcccagctactcaggaggatgaggcaggagaatcacttggacccaggaggtggatgttgcagtgagctgagatagcaccactgcactccagcctgggtgacaaagcgagactccatctcaaaaaaaaaaaaaaaaaaatgaggttatctactggccactggctactggccaattctgaatagataaggtcacacgtgcattcagcgttaaggacccaatcttgaaaatgtatctgacctggtagcatttcaccctgccaggtaacactccatgtttttaccgtaacaaagacattaaaaggtcagagtgtcccaaagattgctttttagcttctttttagaagcaaaaccagaagagtatctgccttgattgagctgtgttgaaaatcactggagttaggaccataagaatcctaggtacagtctgaatgtgaattgactcaacgacttaatggattgccgagtcttaacatcaattaagacagatccgataagtatgtccaaaagggtaataaaataattcagcaggtcttcataaatatgaaatattaaatatttgcaatgtgtcattcaatcagacagataagatctatgcttcagagaacaggaactcataaagcttttaaatgaatacgaaaaaagcattaactgaggcacaaattaaaacagacagcacagtgaatctctatgggcaagaagcctttctagtacctcaatatcccaggagacacagcaaagtaggaagaaacctagggaaataggaataaggattcaagaaagtagcaaagtttagtggggatctttcacaagattattccaatattaatacaaaaaagaaagggcaaaaagattccacacatgataaataagatcggacagactgaaaaatctctccatgaggttaaacagattcccttcatgagatactatgttttcattaattctgtaaatttcaaaggctgaatgaaataagggtctagcactgctgaagcttgcgtaagtatcccactcatggtcagaggaaaataaagacagtaatcctttgacagattaaatgtttcaaacctcaaaaattaatgcattcaaatgcttcaaaggaatatgtttattgatgagtaaatatggttatggggatagaggacaaagataattcataatagcttgatctaaggccattctgtgctaaaacaggagtaacgaaactaagacaagtataaaactcattccaacttccgtacaaacatgtaacaggccccagtgggaaaatggaatttaacatgtgtgcgtgcatgtttctgtgtgtgtgtgtacactctgcttttgtaatggtttgactgatttttgatatttcgctaaaatgtaatgaatcaggattatacaaatatcttggtccttgactacgacaacccataaaagctaccaagctcccatttcttaaaagcacaaattgattaattaatacaaagggataacagcagtatgtgactgaatttaagtttttcccttagaattccttgaggaaagcatacatttctctactcaacataatatttatgtgttcaatcaagactaaaattgtaaaaattgggcaatggatctagttttggcaaattaggcaggtcctcacagcaattgctgtgtgggttgaaagaagagtgggagagcattcaattcattaaacactcctacagcattctatctttactaacaatcttgcagagaattctgcatctattcttattgctaccaacaatatacaatattctttaatacataatatttcatttctatgcctgctggcaaagctgcaaaaaacaaaaagaatgatatggtcaataaataatttctccagtcagaatattaatacaaactttcttataccttgcccttagatgaatgattcaatgcccaggaatataaactaccttgtaaaagtatcagtgagagagaaaaactctgcacactgaagaggaatgaaaaggaagctacccagaaacaagacccctactccacacactgaccacaaccgccccaccctcttccttcactagcactgtcatttgagatgtcccattcctcatctgtaaaatgggataataaaaatgcctgccttgcaacaccccagtggcaacaaacacaccccgcacccagatcttggtttctaataccatttgtcaataagaggaacgagggctctgtgatgaaatgaatgattccaggactgaggcaggagatatataagatggtgtatgggtatgagtatggcacatcttgaaagtaccagaaagtagagaagtacaattaaaaaaaaatgtttgacatacaataagggagatatgtcagagagatacaaaagtcaactaaaagagttaccaatggcaagctgggcatggtggctcacgtctgtaatcccagcactttgggaggccaaggcaggtgaatcacgaggtcaggagatcgagaccatcctgaccaacatggtgaaaccccgtctctactaaaatacaaaaaatttgccagatgtagtggcgggcgcctgtagtcccagctgctcgggaggctgaggcaagggattcgcttgaacccgggaggcagaggttgcggtaagccaagatcacgccactgcactccagcctgggtgacaaagtgaaactccatctcaaaaacagaaagtctcaaaaaaaaaaaaaaagttaccaatggccaaagctaaaacaaattgggcaacaaaataaagttgtactggattataatccacaatataaaataaatatccatgaatccacactgatataaaaatgatgtgataggtaggtagatagataagggggatgagacaaatctcctaagcagaataattccaaataatttatgtgtatacttcacacccaaggaggtggagtataattccttacttctgaagtgtggggtccacacagtggcttccttccaagagaacagtaataaagaccataatcctttattacggaaaagaacaactttacagtggagaaagctgacaacccctatttcagccaggtaatcaatgtcagtatggagatgataagtcattttgacagtatgtacccttgatgtgatgtaatgagaacggcactttacctatgtggtcctcctcccaaaactcatcaccctagacttaacatgagagggcatcagacgaatctcgactgagagacactctacaaaatacccgacgagcacacctcaaactgccaaggtcatcgaacacaaggaaagtctgaacaattgtcacagccaagaggagtcagatgtgatcacaaaacctaatgtggtatgctagacaggatcctggaactcaaaagggactgcagatgaaaactgaggagatctgaataaagtacagtaggttctcagataacatcattttgttcagcatcatttgattacagcattgacgaaaatgaaaaaaaaaaaaaaatagatccccagcccaagccactgtctgtgtggagtttgcatgttctcccacgtatttgcatgggtttctccaggtagtccagcgagctcccacactccaaagctgtgcccattagggaagctggcatgtctgcatggtcccagattgagtgtgcgtgtgtgtcacctgcaatgggagggcatcctgtccagggctgttcctgccctgcgctccaagctgccaggatgggctctggccaccgccctgaactggaataactgagtaattatcttattgatttttattaatctttctgaaatgtatgtatagctcctatttatttcagtggttaatattagaagtgttttgttccttatttagaagctgggtgatatttctgtaaccagaaatttgccataggaacttaactcttgttcctatcaatcagtctatagtaaatttggcatgtttagacgttgtttcacttaaactctgggtttctaagaactatctgtgacttaaatgaggacttactatatgaacttttatttaatgtatcaatattggttcactaatcgaaacaaagatcccataccaacctacgatattagcaacacgggaaactgggcatcaggtatacaggaactttctttgccatcttctcaattttcctgcaaatccacaactccaaaaaataaagtttatttttaaaaattcctgccttgccttccatacaaggttaaatttttcagaagtttatggaaacacatagtttgttaaaaggctacaccacttaaaaatttaaaataaatttaaaaataaatattataggctttcatttttttcacttttttgaaaaaggaaagcattccatttcacttcagagggttctttccaaagaatttttccatccaggaaaaaagaagaaaggaaaagaaaaaagactgaacaactatgtcactgggtgggacccttggagaggatactagaaaaaagagagttactgtaagagattacaatcagaagtgaatcatataagattattagtttcttaactgtagttgtgacagtttgcataaatacactgcaaccactctaagaaggaatgtttcattataactaacataaatgatcattacttagacaaatgttatgatttttttaaccacagatactttcatttgatattactactgtgtcctataaaggcaaagaatattttgcattttccttactataccatataagacttaaaataccaaattatatatcttaaattttattttttatctcttcactatcattgattctcctataaattattgactttaatattcattgttttcttaggaaagaactactgaaaaacaggaaaaaaatcaagaaattaacatatatattggtttttaaaccacagcattatgaaatctaaatggtatataatgcaactggatgtatatttatcttccgagaatcctctccaaccagtcctcctctatgccagagaaatgccacttagtctacatgcttgggtaaggatgtcccctcccctccacatcagcagtggtcatatgacccaagcctaacagctgtgaggatttgccccttagtcaccttgattgatttaggaaataggtgaccaggccaagtgttaaattatcagaaaagtgcttgctttaaaaagccaggccaggcgcggtggctcacccctataatcccagcattttgggaggccgaggcaggcagatcacgaggtcaggagatggagagcatcctggctaacacggcgaaaccccgtctctactaaaaatacaaaaaaaaaaaattagccaggcgtggtggcgggggcttgtagtcccagctactcgggaggctgaggtaggagaatggagtgaacccgggaggcagagcttgcagtgagccgagatccagccactgcattccagcctgggcgacataatgagactccatctcaaataaaaaaaaaaaaaaactttatgatggaaatttgaggcaaccagcagctgtattgctgccacattttgatagcctaagataaagcaaacagaggcaaaaataaataaagtaaccaagaagtgaatagagagagtactaaggatactagtcaaattgccacatgcagcagttcttaaacacggcttcacctcttacgtgtcccattccataaacgcttttttgattaaacaagtttcagttagtgtatcatttaagattaggtttggctgcaagtgtcagcaaacttaaaaggacagtggcttagacattactgaagtttctatttctcgcattccaagtgcaaagtcaggcagtcaagggtatggaagctgtgcttccccaagcctcacagaactcatgtacattccagctcatagctccaccatgcccagggtgggacacacccaaatggttcaatatagcactgagacagacgtccagctgtcacacccacattccaggcaacagaactgaagaaagaaggacaatgtggagtaaaaggaatgtactgggggactttacaggtggagcagctttacaagctgctcactatacatcagcttacatctcactggctagaacttgctggccacatgtagaggctggaatacgtcatctttattctaagcagccacacacacaatgaaaattctattgtcacggaagaagaaaggaaggaatagactgggcgacactcagcctctctcacagctgggtttctgtaacttccaataagacaactatcacaaatcatatgctacataattgctgttctctcaaggactgttttttttttcccaaaatgagaacttttaggcattaaatcactgtagtatttatgttttgggaatcccatacagcaatgacacatacttagagaacagaatattaacacctaatttcacattttagaccattgagagtagagctttatcatgtggcccaaagttgctaacataagaatgtgaatttaataaggaattaaattctggaatagataaggaaataagtcaagaaacccaacaaagccctggtaaaacataaataactgacagaaagggaaacttaaatggccaactagaatatgacttctgagtaaagaaaacagactgattatgaaccttgacttgcactctctccccaattcaaataaagtaagatggaatagatttttctttagatacagaatgtgagataagtcaataagcacaagatttctgaaaaggttaaaaagtaagtggaagaaatgatttggcagaccctggaaagccgaatgagggaggccggccaattgtgaagaaaaataacaagcaacctgacacagccaacaaaacctcccagaatctgggacactctcagctccctacgaccagaaatggcggtaaaagtctagctaaaatgaggaagactgattgacagtccacttgagaattagttagatttccacatatcctcgtgaacacagctggaggactgtccttctcagccccagaagtctagcagtttattgctagtgcagagtcaaacaaagggcctccactgagagactccatagacatcttgtacaagagaaaatcataccaagaacagagtgagggaacaaagagtgataagatgtccagtttcttctcattcaaattgcaaactgctggcagcctggtctacaatggtaggcagaagcttgaaaggtttttctatggaagacctaattagccctagactcaagcctaaagacagttcctgccatcaagggtgcaacacataatagcccagccaggtgactctgctgagaagagcacagactagctcagagctttcaggaagctgcttagtgccccacacagagattacagacattattaatgcactcaccaaataagaggacgtcattaaaaaagtgttattctcagaacaacaagaaaatgttcttagaaattaaaaatatgatagtaaaaattaaagaataaataagaagacaaaaagacaatgatgatgtggtctttcagaaagcagaacaagactgaaaacaggagcaaaataataataaaattggaattccagcgtgggataatccaacatttgagaatgagagctaaagagagaagagagaaaatggagataagaacagcatcaaccaaataggggatcccttgctcttcaaattctcattctccgaactcaggaaccaaaaggaagaggaaagtaagttctgcaatagtatctttggaagaaacagtaccccaatcctctgacatgtcctaacactgttgcttgccatctgaactcagtaaatgaatcaatttggataccatgagatttctggtgatggtggttttgttgttgttgttgttgttgttgtttttaattccctaaaggaaggacttacgtttacagaatgatagggcccactgagtatcctgcaaaacttgacaaaaacaggccacataaaggcatgtcattgagaaattcagaacatctggaacaagacacttctacaagatttcagagagaaagaaaaaaaaagagtggggagagaaaagtaactgacaaatgtattgggaatcttaatggcatcccaatgtaatctagagtggaaggatgctttgaaatcccaaaggaaaattatttccaatcttcagttatagaccatactacattatcggtcttgtataaatgttaagatattttacacatgctggatttgaaaaaattcacctctcctacaatctccctcctcagaaaggatgatatgcttagcaaagaagagagtacacaaagaaggaaaaaatcttgatatgaggagacaaaggacacacagggagggaaggatggttacaggtaagcctgaggatgagggctgtgtacaaggcaaagcacacctgatggccccaagaagatgtacttgacagacacctctggaatctgaacgcattgagaggagaatcagacaattctgggtttgaagcagggataacaacatcagaaactgaaaacacagaaaaaattactgttattggtctggtcaatgatttcttcaatatgaccccaaaagcacaggcaacaaaagcaaacatcaacaaatgaaattccatcaacctaaaaagctacaccacaaaggaaactgtcaacagagtgaaaagacaacctacagaatgagagataatatctgctaaacattcatttgataaggagttaatatccaaaatataaaaggaactcaatagcaagaaaacaggcaaaaaaaatctaaacagacatttctcaaaagacgtagaaatggctcatagttacatgaaaaggtgctcaacacaactaattatcagggaagtgcaaactaaaacaacaagacatcatctcacagctgttagaatggccattatcaaaaacacaaataacaagtgttggtgagactgcggagaaaagggaaccgttttacactgctggtgggaacagaaattacaacagccattacagaaaagtgtgtaagttcttcaaaagttaaaaacaggactaccatatgatctaccaatcccactaccgagtatgtaaccaaagtaaatgaaatcagatcagtatgttaactagattatctgcactcccatgtttattgcagcagtaatcacaatatttgtaaccaagctaactgtccatcaatggatgaatggataaagaaaatgtggtgtgtgtatacatacacacacaaacacacacacacacacacacacacacacacacacacagtggaattccgctaccaactctgtaagaactctgcacatttagggacatatttcaggcaaactggaaagtatgcttgggtggtggtgcgaggaggggcatgaaacaggaagaagagtagaactggggaatgaagataaagaaagtaaaatgagtgaaacagcagaggtgtcttgtcttcctggtactagtaagagtggtggggcatgaactgaggaatagaacagactcaaccatgtacatcagatgatcaaacataccatcaccactcgccatcacaccccgcccctaaaaaaagagaaagggggagaaagaattgggatcaagttagaaagaaacagaagtaggatcaagtaaaaaggaaagggaacttggaatcgtaagataaaaatcccataaagttagagttatacaggaagaataagttctaacattcctttgcacagtagggtgactatagttaacaataatatagtgtgtatttcaaaacagctagaggaatgcattttgaatgttctccacaaagaaattatacatgttcgaagtgatggatttgccaactaccctaatttgatcattacacattgtataaaactatcaaaacatcatagtataccccacaaatatgtacaattattatgtatcaataaacataaaatgaaacttaaagaaaaaaaaagaagataaagattccaaagtctggctccaaaaccttcaaggtgtatgacttaaattttacctttctatgcctcagtttccttatatataaaaaagaaagaactaactttttagagtgattctgagaattaaaccatagtctataaataccagggttttaaagctcagaaaacagaaaacagctccatgtgcccatcatttggcatcagaaacattgtgcacattgtgtaggtctctccaaaaaaactgggccacagacaggaattgtcacgctgcctgggtttacctgctactcattagataattctgagaattacattttaaaataattgttggaagcgtctactcttttttttaagttttctattactcccattcttgagatgactattttctactgaaaataagttttcggacactacagaaaggaaataacaatgagccaacttattaaagctgagaatcaagttactaggcagggaggcacattatttacccagcccagcgccacactccaccatcatgtggcggccagatcacatgacacatgattcaaagggagaattcttaagcaagtttccactctagcttcctaagttttaaagtcaatgtgccagagtcaacatttgcacatcacggccataagtaaagaatcaagtgaaatcaaacgtcattgcctctacaaaaggacatccttactggtgtctgtccttccctcccattactacagctgagatgaaaagttgaagggcaactggctctctctcccctgtgtatcatctcctcatttctgcctcataaacttctaaaatactccactccctggctagtagggtttttcctcataatctctgccaatgaaatatcttgttttccctctaaaacatcagtcttccctggctaccatatgctctatccaccaccgtcatacaagaagtcattaagaatgcacatgtgtacttattccgcaccaggagggcccttgtgtcaatcaggaaactatattatctagattttattttcaatctggttgtatgttgataatgaacatctttcaatacttgctgtaataaatgaaaatacctaaaataattaagaataaattatgttcaaagtatacttaatactgcacataagcaattctactgaatacagcattgatagtgaaaaattccatttgccatttatggtgaaaaactgactatatcctacacatactttatttatactaaatatacattccttgtaagagagagatctctcacctttcattaaactataaaaatcatgctaacaagaaataccatatattttctttgtctttccttccattaccactaacaacaaggatgatcatgtgtcaggcactgtcctaagtccttcccatgtattaattaatttaatgctcttaacaacctaatgagctagggttcacatcgctgtttcatagatgaggaaactaaagtatagagaagttaaaagcccgctcaaagacacacattaagcaagcactggaacaggatacaaacccaagcagtcagaccctgaaacagttaaccactggcttccataatagccagaataatgctttgcaaaggtggaggttacatgcctggaaaattggactcagcacaagcagatgtgtaataagtatagaatgaatggttgcaagcttgaattattgcatgaatattcttggactagaaatgtttttaaaatattgcctaaaattatatcagtacattgttaagagggagaatgaggtggagggaaagcagaaaactttgtggcatgtctgcattttagtcacaatgaatggtaaaatgggacctagagacacatagtcattaaaagaactaaggataaattcattctgtgggattaatgggtacagaatattactatgaacatttagaggcatatttcttagtcgtaattaagaaagtatttgtgtcatatcttaatgaaatcccactctcaagaaacatttgcatgtatttcatcacataaaaataatcttagggcactgtaaattttaaattgctccagaatatcttcaataggtatttcatactactcacagtatgaaaattcttagaccaaagaaagaaaacaacaaaacatataaagtctgctcctaactccaaagactgacaactgacaggcttgtgaaggccactggaacaattcataaagagaaatcaaagcaactgacttcagaatgatcatttaaattttcagatgctttggccaaaaatttggtatcatttatacatgatacagaatataaaaaagccattagggtagctgtagtcagaagctggagtttttccatcagcataaaaatcccacggagagtcagctcaccatgacctgtatcaattcccttgtagaggaccaagcccgagacctgatgggagaggctggcaaggaagagcaaggaagtgaatacttggttttagaaagacagaacaaaagagaacttcaagattatcaagttcaaatgattcattttacaaatgaaaaaacaactcaaggcttaatgcaggagcacataagcttctaagatcagaatccagggccattctcacaactgtgctgcctcctttgttaatgcaattttttggtgttcctaatatatcaaggttcctatacattttgctaactacattaacaccattggcttttattcactggaccgtgtactttccattcttgatagaattgcttgtacctcattttccaaaataaaaacaatgtctacgatcttaagaaaaattactcataagcttaaacatcttcagtgcacatatacactaatttgaaattagcaaagacttaatactaaagaaaataaaagttcattgtattatactttgtatggacacatgacatttattccaaaacatgataatacagcatcacacacatcagaacatcgcgatgaagaaggtaagaaattacaataacagggcaaagaaattaagacaaagagacgtcaaatatcttgctcaagagcacctagcagaatatgcaattgtacagcagccactgacatttaccaaatatttttaaagcatcagaaaaatcatgttaagaaaaactgccataagaaagctaacaaagttgtaacaagtcaaattctgccctttactctctcaccaaaatatcgtgtagtgttggcatcaagtagttggaagtttagacttctatttctcaaatccattccatttacttacatgtctttaaaaggcaaaaccctagctgtaaagcaatttattagaagaaaaaaaatgtttgtactgatggaacacaacaacaaatcaatacaaagcatttatttactttgccatcagattatctgaggatgtctggaaactgtattttcttggttctttacaagatgcaacagaaagctgcaaagcgtgctccagtaggtctgatctcgtatcacactgtgcacatatgatgtgcatcaccatctatgcaagaatatggaaacaaactataggcacagtcaaccttccacagtgtttttacaaagctcttctgttttcacctgggcttagcttctctgcagccagagctcaccatggctcttaccacggacagtcaagatacgtccaaaggaaattttccctgtaacactggaaggtaggataagcaacggtggcagagggaaaaaaacaaccaacaacaatttaccctaaacactgagttgttctagcagcaggtggacaataagcagtgtatataaaacctcaagtctggggccaggataaacggaggcatgtaaggcccaggaaggacaaacagcaggcttggataatgatatcaaaacaaccccaagaacagtggtagatgtgcacaggtgggtaacagaggcagaagaaacagaaagaagcattgagcatgagctgtgccaacaccttctgaggctatcctcaacccagttcaggaaaacatgggtgtacctgagaactcagatgcagacacctgcagatacttgccagaagaggaaagcagaaggaggtaagagtccagcagctcccaaccacaaatgtttttaaaataggatataggaatggaggaggtctgagggaggaagaaagggagagcaagagggagggaaagagggagagaagcaggcaagaatggagcccacactgtgatttaaagaggaagaaaaccaagaaccatattgggtgtacacagcagcccatcagttatgcaacatacatgtaacccaaatttcactgactgtcacttctttctaaagcatctgttaggggatttgttcctgtatgttcgttggtagttttttagggcctggcttttattgctcacttgtcattctacttacagtaaagattaataacacttcatatggtgtgtgatgaataagaaattcaactgacacggcactaggtgtaaaattatgcagtacatccatcgctttgagtgcatgagaattcgatttaacatgaagagctccctgcacagaggggagaagtaaaacttatctaagtatttgccatgcttattctacaaataggctcagaaaagtaatctgtgaaaataaaaattgtgttacccatctatattgttgaactaaaaaatgttatttcgaagttacagtaaaccccaactcatctaaaatctactagaccaaaaaagccgagattaccataattatttttggctttaattctatgtgtaaaagaggaatggaaaaatatttaagagccatgtctgccttttttgggaggggagagaaggatgaaattcatctcagtggaaaaataaatctgcatacctacacacctcccttgtggggcctggtaaaggagtgaaaagacctggagaaagtattaatgggtctctagatgagcaaaaggaggcccagaagtgggtgtgggcacaggagccagagaaagttgcagtgctctgtgtaactcagactcaacattatttttgtactctgcagtgagagacagagagaccagccatgatgagctgccagatacaagctgctgaatcctgaagaggcacttttaaaaaacatggtctaatattcgatttcaggcttttttgtttctgaacttctgaacttttgttgcccttatcttcattatcttcataaagtttacccaacatgatcttaattttaaaaaaacagaaaggcaagggaaaagggctgtgttcctgtgtgggtggagacaaagtacaacagggacagccagttcataatggcgagacagacacaaagctggaaatccagctgcctgaaacctccaccccatccccagggaccgagagggaactgtgacctcctcccatccctaatctcactgggctcccaaagaacaggttacagcatgtactacactctgagaagacaaaagcaatcgaaacgatggctacaatggtaactgttaagaccaaagcactcagctagtataagacaaaatatctataaataaaaaagacaattttgaccatatcaatcagtcacttccacctcctaaactggaataacaagttgcttttcttatccccagtcattgatatacagaagagacaagtcaattcaatggccagaaattgccaatgatgaaattattcaactattttaaaagagaatatattatcagctcttaaaattgagcacaaaaattcaaaaatgagagacagtaacatcctgaaagttatttttgttatacataagggaaatgaggaaaaataagggaatggtaacattcaaagggagaagagaaagatgaagagtaagaaggaaggaggtcaaagcatgtacagtgaagggaagaatcagatgaaaacagagatagagacttggaaacagggaaaaacaaaaactgaaagagttcatgcagccactttatagctatgtaatttttttttttttttttgagatggagtctcactctgtcacccaggctccagtgcagtggcatgatctcggctcactgcaacctccatctcccaggttcaagcaattctcctaccgcagcctcccgggtagctgggagtacaggcatgcaccatcacgcccagctaatttttgtatttttagtagagatgggtttttgccatgttggccaggctggtctcaaactcctgacctcaactgatccacccgcctcggactcccaaagtgctgggattacaggcatgagccactgtgcccggccagctatataatctttgataagtttctcagaaccttagtttcctcatctgcaaaatgggtgtgaaggaatttatctcataattttatctttttttttttttttttttttgagacagagtctcgctctgtcacccaggctggagtgcagcggcatcatctcggctcactgcaagctccgcctccgggttcacgccgttctcctgcctcagcctcccgagtagctgggactacaggcgcccgccaccacgcccggctaatttttttgtatttttagtagagatggggtttcactgtgttagccaggatggtctcgatctcctgacctcatgatccgcccacctcggcctcccaaagtgctgggattacaggctcataattttatcatttaaataatatatgcaaaagtaacacacatataaaaatgcatagccatacacagcagagtgtaaaagaaggaaagacattttaaagtataagatgatcatgaatgagacctgctactatgaacttggattgttgttcttattttctacttatttgatttgattttagattcagggtacacatgtgcaggactgttacacggatatattgcataatgctggggtttgggcttctaatgagcccatcacccataaatgatcattgtacccaaaaggtaatttttcagccctattcccctcctaatctcctgccttttggagtcccccagtgtctattgtttatgactatgtggacccactgtttagttcccacttataagaacatgcagtattttattttctgtttctgacttatttcacttaggatagtggccttcaggtttcatccatgttgctgcaaaggacaacagtttcatatttttatggctgcatagtatttcagtgtgtatacaccacattctctttatccagacaactgctgacagacatttaggttgaatccatgactttgctattgtgaatagtgctgcgataaacacacaagagcaagcattttcatagaatgatttatcttcctttgggtagacacccagcagtgggattgctgggttgaatggcaattctatttttagtttcttgagaaatctccaaactgctttccacaggggttgaactagttgttcccacgagcagtatacatgcattctcttttttctgcatccacaccaacaactgttgtttcttgactttttaataattgctattctgacaattattatcatgtgtaagatgatatctcattgtggttttgatttgcatttctctgattaatgatgttgagcatttcttcatgtttgttggccacttacatgtcttcttttcagaagtgtctgttcatgaccttggtccactttttaatggagttttttttcttgttgaattctgtgtggattccggatattattagtcctttattatcagaggcataatttgcaaatgttttctcccattctgtagattgcctgtttattttgttgattatttcttttgctgtgcagaggctttttaacttaagttccatttgtctatttttgatttagttgcatttgcttttggggaattagccataaactctttgtctaggccaatatccaaaagagttttaccttccagggcttttatagtttcaggtcttatatttaagtctttaatccatcttaatttttgtatatggtgagagacaggggtccagtgtcattcttctgcacaaagccagccattttcctagcaccatttgttgaatagagtgccacttccccattgtttatttttgtccactttgtcaaagatcagttggttgcagtatgtggcttgatttctgggttctctatttttctctattgatctatgcatctatttttgtaccagtaccatgatgttttagttactatagctttgtagtataatttgaattcaagtaacatgatgcctctagctttgctctttttggttaggattgttttggttgctcgtggtcttttttgttttcatataaacttaaggatttttttttaattctgtgaagaataactttggtattttcatagaaattgtgtcgaatctgtagattactttggacagtttggtcatactaacaatattgatgcttccaatccatttgtttgtatcaattaaaatttctttcattagtgttttgtagaacttcttcttaagaagacatctttcgcctccgtggttaaatgtatacctaggttttgtgtgtgtgtgtgtgtgtgtgtgtgtgtgtgtgtgtgtgtgtgtgttgtaaatggggttgagttcctgatttggttctcagcttgaacattactggtgtacagaaatgcaactgaattttgtacactggttttgtatcctacaactttactgaagttgtttatcaagtctaggagcctttccaaaaagtcttttgggttttctaggtataagatcatgccatcagtgaacagagataattttacttcctcttttccaatttggatgtcttttatttctctcttacctgattgctctggctaggccttccagtactctgttgaataggagtggtcgttttctattttctaaaatgttcactgatctctattcacaggttttaacttcttgaactttactcctgaaaaagcacttcactattgatagagcacttatttcctaccagaagagaaattattttctagtagacaagggtgaggggaatagtaccatctcatgggctaagtctagaccttggtccctgggttaccatgtgtggtccaatactttcaacacaaacaaaaatgcagctatcgaatcaaggccttgaggcattgtacaataaagtaacattcatcatagcaagagttcacattaactttggtctttttatgtaggaggtaccaaatgaggcatttcagatatattctctcaaaacatcacaacaatcctttaaggttaagttctatcaataaggtcatcttataaatgaggaaactgaggccctgatatgttaggtaacttagcctaggtcatgtaacactgagggaggaactaggtttcaaacacagataggtgggttctggagcctagcttttaatcactaagacaaatttcatgatccttaagaaacttctaagttccaaagacagatgaaatcaaggtccagaaaaatttaatataagcatactacagtttttcctaattgccctctaaagtggcacgccagttattgcacacagtgactttcaattagactcatccatctaatttccatgatacttcctagactgtgagaccacagataaaaaaaacactctggggtctcagtttcttcacctgtgattaaaaacaatcccaatgatgtcccaagttctagcaaataatgaaaaattactctgcaacctctgccataacttccaagtatcccgaggctaatctgatccttttcccactgaaacatggtggcactctctgagcaaaagtctttaatttgaaggaagcatcctcctaaataaaggttcaactactttgaatacgtaaagtattgtagaaatcaaggtcacacatgatttttataccttgacgttatatgatagctttctgaaacttttaactggaaaaaatataaaagttgtgcctttctaaccataaattttaagaagtaaacaaaagaatatatgaatacataagccttagtcacatataaacacctatactacatactttggtggggtttttttgcactagtgcttgctttcagaagaaaagtgccagcagagtcttcctcagttgtcttgagactgtggttaccctatttctaataaacaaggcagcttcctgtctctggcttctcattgctaaatcagggttgaattctggcagctttcatagccctgacccctgagtgcacccatgttaaagagtgtctgctttgcttcattccttattgtaaaaaacgactcatcatggagcacctcttgttttaaaatcttgcttttcatcagtgaagctcaaaatgagttaatttcttacactcaaaacttagtctctcattttctctatatttgtctctatttggttgatgtatctggactttttctaagtctctaaagggatgaagctgtgtacacttttagatcgtttcggaagtggttaaaacagcatcctgtagatgattttatgatcaatcaagtattcatttatgcttttctcttaagcatctttagtgactgagcccataaggcaagagttcatagtcagacaattaaaatgcacttcatgttacaaaacaatttttttaaacaagtgatagaacttgttcttaagggcttaaaaatgcaatttacaagtattttcttccactttggggttgttctgaagtaatttactgtgcagcatgatattcaatttgtcttcaatatgctgataaattatctataaatctgtctttgttttgcttgtaatctcttacagagctgtgtcagcaaagggcatcctttgcatttctgacccttttgtgttaaaaaagaaaaacgaaaaaatccatctagctctagaaacaaaagatttcatctccagcttttcaccatcaccattttcctaacccacaggaacctattttgttggatggttggtcccttgacaatgagaccccacttgaaataacctgaaaaggctagagatcctcttcacccactttctgtgtgggccattacacaagccctcatgcttcccagagatgtcagagccccagccggtgtgaaatggtgatgctgtcagtcagcaggaaaattttttgcttcggaaaaacctctctctccgagcttcctctgtgccgcacctccagctgcctcggtgcaccatgtcagggtgctaaaatagctcaggcttgatgacttcactagttctcacaaacaggccagttggcagaactctaatgcagtctgctcctgagtggaagacatttttttttctccccaccatcctctaatatgaatacttagtttcattttgactctggaagaagtctcctttctgggagtcaattcagcacaaacttaatgcaaacgtttcaaaatgctttaaggaggcttgaactaaagagctaccctaaagccaataccatgcattcagactgcactattatttcctatgctaaccttcaaggacatcaaaactgctaggtaaattaaccttatttaacaaccttcatatttcatttatcttagggccaaatatcttcctcaagaatagtattaataactgataatcagccaagattttaatgtcttatttctcaggtttactcctttcccacaagtaaggaggtcaacagaaaatatcaaagtaaaaattaactaccactacatgtactcagcataaaatgacagggggcctttaaaggcaatgtcctgtaatcacagcaaactttagtgattaatactcaaatagatttgaaattttttttacagtataaggtactcatgcactaaaaaaggtgttctgtattagactaccaaattttattttagtatttataattttcccttatagtttttcacttccttttgtaattaccacatactagcaaaaaaatactgcaagaaaactagaactttctgatgttccagtttcctaattcagtgctgtgcccaagctgccctttgattccaaaagacagcatttagattaactgcttcagtgccctgtggacacaaaatttatgcccaaagaagaagcttccatatgattctatagacatgagctaataaaataatttggttcactggtttaagatggttcctctaaaaggggtgcaatatccctgtccccaaaagaggaaaaaaatcacaaacattctattcccagcacccctcagttcctctcactatctgtccattacaaacagcatctaaataccactgccatcttgcaatggtgatgatggaaaaccacccctctccatcaccaagaaaaacatcacagggattctcagagaacacataggctcatatataactgtatatttttaaaatgcattttaccatacaatgatttgttcattccataaacatttgcctagtaccttgcatgtagcaggtattacatatgattttctacaggcatgaacagtgtcttcgtggatttcactcactcaatattaagtattataaagtcacataactttagcaaaatgagacatgggtggctgcaatcgttttgtttatgttaatccagtgacttacaaaatttggtgttgatgatacatccaaagaagcattggagtccagaattataataaccagggacattttggacatagtccagagacatgaccctgaaattaagagttatcatgtctctctgctgtagaggctaataaacaaagacacaatggagattctgaatgctgaaaggtcaattataaatgtcattacagacacaataattcacagaggaatgaaataggctgagtagtttgtgatgctgactgtactaaccatcaaattttagaccataaaggaccttagatctaaaaatctcacactgtactaatgatgtctagaaagtctgtgtgatttgtacaaagtcacaaagtcacacaggtactaagttatctcagaatcaatgttagttttattcatcctgcattcttcccatcatactactctaagtctgattcacacacactcatgtatacgttattctactgtttttgactcatacacaaatatacatgtacacacatacacatacttgtctgcccaattcaaacaaaaacacacacttcagtactctgcttctgattcatatatacatagacacaaacattatactcccatatcctgattcatatacacatacattccactatcctccatctgcttcatacacacattttactgattcatacatacaatctgcatatatgtatattactctgtatctgattcttacacacacacacacacacacacatgtatatatatatatacacactgtatactactctgtatctaattcatatgcacatacatattggcatgtatatacacactgaaatttaaaacagcaaatcatggtcatattcaaaacacatatattttaaagtgagaaattcaggtgtgagccagacacttgtgtaactatgtcaaagttactataacttatacaatgaagtaatttatctggatcttcatttacctctataagagtcccccaaagaattgaaagaaataagacctatcatgatgcagaaattcagtgaacccataggcatccatctacatgaaaatttttgtcaggtcaaggatgagaatatgagtgtttgtgtgttgtactgttttctgtaatatgggatagagaagtggatatacacagaatccagggacagaggatcatattctgtgtccttgttccaggataaattcccagtttctgagcccatgaagcagtgtaggagtgacgtgagggaagtgcatgagcaacgtggcttgggaccgcaactacaaagtgtgacctgaggaacatcctcccctctcctcaagggctggcaacgtagagggctctgaacgatctctctagacatgtgacatgaggattctaactggagttagaatctcaatcatgagcccctcacagaggttttatgaagaaggggagcaagcagtagacagagatggagaagactcttcagggtaactagctgatacagtaattcacatgtacatagaagacattcctggggacgcggacataaaaagattagggagactttatggaggctagaggtcctgcaggagcagggaggtgcataaacagaaaatgtggattgttgtggattatatgctccatccacatccacaggtcagtaaggcccgtggacctgcaggcaacactgagaagacaagactatgaagaggaaatatggaacccaacatctgtgggtttcagactgtacgatgttattctcaaaaagtcgactgaagcagatggtgaatattatgaacacttgttttcttaagctacttgctctaaaagtccagcacacttttctttatccatagtttttcttcattattaaatatatccattaccaactcgtaaatacattatattgaaagagcctctgtaggctgggcctggtgactcaggcctataatcccaacactttgggaggctgaggtgggaggatcgcttgagctcaggagttcaagactagcctgggcaacatagcgagaccttgtttctaccagaaatcaaaaaaattagccaacacgcacctgtagtcccagttactcaggaggctaaggtgggagaacgacttgggcctgcctagaaggttgatgctgcagcaagccatgatccaaacaatgaggaactgcttttatgagccctttagataaattatagttttaattaaaatataaaaataaaacaccaagaataatcatggtgatgttatatgtgaatatatatctcttcctggattttgcttaacatttaaatatcaaagatagctgtctttgatagtcctcccaaactgggcagcaccatcactctggccttcgaagggagctataaagctcactagtagtcaactcttaaaaatggggcattattcctaaaaaggaaatatacagctttaagcaaataaacaataggtactttgaagaccattttaaagaacttacccatagcccaagataaacatctgctaaggatcaaaaagatcaggccctgggcaggggcttggggacagtgtggacagggacacacatagctaactgcttttcaaaaattggaaaattaaagccctcctaccaaggattacaagaaaaccctcaaagtttagcaggtcaagtacaaactaataatcaggcctgccaagaaagaatttgaacaaccttgcaaagtattccaaagaaaataaaaaatgttgcttaacaagatacaacccttgaaaatgaagtgagattttctgcaaagcatgtacatcagatgaaaaagagtctgtatatgaaattgaatacctttgtccttggtctctatgaagtattaaaaatattgtaaatactaagttatctttggaaacagattgcaggaactaaatcaaacaattaccaacttaaggaagagtctaaacctaattattacattagatataacaaaagcaaagacctgtttggcattatcacagtgttaaaaactcaagaggaaatgtgtaaattgttggcacagatgtaaaacctgaattacaactaatcactatatagaaggatgcagttgctaatcaggtacctatccacaaaatgttcaaaataaaggcctttcaagtattgaagaaactacatattgaagaaaaaaaccacaggaattaatgatgtgatatgattgagcactcactctacttggtagcaatcaacagacagtaaccaaccaaagaatagttttagttttaaaaattacattttgccatggtgaaagcagtggataaatgacagagaaacagatatataagcatgcacacttccaggagacaggtgctcaaaatggtcttatttaacatttttataaatgatgtcagggaaggggtatacaggaaagtaggcaagtttgtattaagctcttctagttaccaaaatgccatgtaacagagataaaacatccttttagcagcaatctgataaatatggtagaatccttttaaccaacttccgcttaaccaactgtccagattaaccaatgagctccattccccttgtaaatcatactgactgatgcacctggaatgtgaccagacagctggctcctctctgagcagaccgagtacctcagctcccatcagccaaggcacatttttaataagaggtttttatcctaaacttgtttatgcagtaatgccttatttttaaaatgtgatttaattaaatgatacattacttaaggaagtgaaataagaggatgaaatgcagcacagtgtctatttctacgaaaaataagttgtatgttttgaaaaattttaaagattcagctactataacaattttttaaaacaatttttaatactgaataaggaagctatcctaattgtactacaatggaaaaaataagaaatatcttcaaaagtgtttacttctctttaaagaaatatcagaaataatggacaatccatcatggctgtaatcctggtaagaagcattaacactaaactccatctagggattcatgctggaagaaagtgtggatcctacatccaaagattgatagaagatgtattttttacgtgttatgttcaaataaaatttttttcttttttttttttttttgagactgagctctgctctcttgcccaggctggggtgcagtggtgcaatctcagcacactgcagcctacacctcccaggttcaaacgattctcctgcttcagccacgtcagtagctgggaccacaggcatgcgtcataacactcagctaattttcgtatttttagtagagactgggtttcaccatgttggctagactggtctcgaactcctggcctcaagtgatctgcccactttgacctcccaaagtgctgggattacaggcatgagccactgcacccggcctatttgaataaaataatgaaggtatgtatacatcatctttatactcctctatcttttaactaactttttgacaaactgaccaactattgattcttacttctgtcaaggctcctgtgtatttattgtcatgtcttctatgtgccagggactgtgacagctgctgtgaatacaaaagagactaaggttttagccctccaagtggtcaaatgtaatgggatagacagacatgctaacaaacagtagctattcatcatactaagcattgtaagcaaaggtgacccctgaattacacaggtttgaactgcctgagtcaacttacatgtggctctttttccccaaccaaacacaaatgaaaaatatagtactagagggaagtgaagctctatatatggagggctgacttttcctataggtggttccacagggcaggacttgactatgcaccgatcctggaacaaatcccccgcgaatatgaatggacactggaaaagattctgttaagcatggaaaagaaaataagtctggagagagtagagttgatggtggtgaggcctgcagagtgagttatggtgacacagatgaggtacgaaggcacattctgacagatcatacgtgcaaaagcatggagcaacaccacaggtccaggtactaaacatcccaaatagtggagaggttggaaaggctgggtagaaacaagaccaggaggacaatgttatttgagttttagaccataaattatggggaatcatatattttaaacaaaagagtgacacaatcagacatattttagcatagtatcttttccaacagtttagaaaatgaacacaggtaacagaggcagaaaataggagattacaaaaatagtccaataaaaaaatagaagaagaatattaagaaaggtatatcagcatgacttggtgactcatgagacgtgaaaagagtgaaggataatactgacttaaaaatggttcctaggtttaggaatgtcgcatctggtggtcaaagattcattaataaaaataggaaatgaaggcattttaaagcaacagataaagaacaaagttgtgaacatgatgagtttgaaatgctatatatccaagaaagagatgacaaatatgaagctggccctcaccagctagtgctcaagagaggtgaagagatctatttaaggactcattactctatgggtagaatttgaagccgcagaaataaatgggcacatgatgtaagggcaaatagagaaacgaggaagacagatgaaactctttcaaatgccaaatttagagacaagaaggagaggagacccatccacaagactacaaagtgacaggaagcagcagcagcataggaatgacatgagagccaagagaagaaaattaaagcaggaagtaatcaaccacatcaaatgcaaaagcgaagtcaaagaagataactcatgaaaccactgtgcttagcaggtaaacgaccactagccaagacagagcttcgcagcaggtgtgtacactcaggcaccttgagttggagatagaatggactatgaagtggggacaagctcttaagaagctctccttcagccaagggccaaagagggcaagagtcttttctagaggatgaaaacagaggaatatggggttttgtttgtttgtttgttttttcaagatacaactttagagactggaccctgccagcaacagccaccatccaaaacaactcaccttccgcagagtgaggggaaggatggaagaggactaggcagggataggcccactaattggtcatgaagaagctgataagagttcttgacttacagagatctactgtcttggtgaagcagatactaatctatgagagtgagaatggcattgttaaggcagcaggaatgagaagggcaatgaagttttaaagctccctgggtgggcaatgcagcagaccttctgagactctggggttgggtctgtaacatttcccttatagataagtaaaagatatttcatgaggaaaaaaaaataattgattgaagtttgtgggaacatggatggcagttgtgaataaacaggaagtgggtccaacagtcactatgaacaacttatagaagacagctctctaatactgttaacacaacacaaatatcaacaaaatataagcattaccaaatagaactcaaaacaaaaattacctttacagaactgtgatgctcttcataatgttaaccaccacaccctaataagtaatgcatgttaaagatgacaactacttacactttattcatcatgagaatggagagtactatataaaaataatatggagtttcagtctagaaacataaactaaataatctatggaatcctagttgccaagaattttataacaccatttgtccatctcatcctggcaacagtacacacaggagtattttattaaaacctgagacaaatacaaataatataaagaaaatgaatcaattgctatttcatatggcaggtgttaaacctataatccgcaagactaaaattttttaaaacttcatcaagttttaagaaatgactggggccgggcgcagtggcttccacctgtcatcccagcactttgggagggtgaggtgggcggatcacaaggtcaggagatcgagaccatcctggctaacacagtgaaaccccgtctctactaaaaaaaaaaatacaaaaaaattagccgggcgtggtggcaggcgcctgtagtcccagctactcgggaggctgaggcaggagaatggcgtgaactcgggaggcggagcttgcagtgagccaagatcgcaccactgcactccagcctgggcgacagagcgagactccgtctcaaaaaagaaaaaaaagaaatgactgaatggcaaaccgaaatggattcaaagaaacaagtagtagcttaaagaaattaagatacgagtgaactacgttaaagaggcaaccccatcatgaagctacaggggagaaaactgattggtcatgggtctgactgtgtatggtgatttcttattttaaatcaataccaatgggaaagaatgaacaattctccacatattaacagaagagtgttagtgtaatgtaatgaatagcatcttctaaattttcctccccaacccccccacctgaacaactggacaatctaccgcagaaacttacatcatactatatagaatactggggtagtatccaaacctccttatgaacctccaagttctctctacaaaagaaattttaactagaaatgcaaatttacctggaaatagatgaaggcagatcaatgccatttggcttcacttcaaattatattctacctttattacaactcaagtgattatatattatcatacatttcttttgtacctattagcacttaatggagtgtctggaatatggtacatgctcattaaaaagaaatatgaaaatatgataatgaaaaatgcatgaattcttatcaactcctaaatgtctactatttccaagatctttttaagaattaagaaatacaaatatatatatatatatatatatatatatatatatatatatataaaagattatctacaagaaactaaacaacgttaaaaatagcatacaatctgccaggtacagtggctcacgcctataatcccagtactttgggagaccaaggcaggaggattgcttgaggccaggagttcaagaccagccaaagcaacatagcaaggtcctctacaaaagatttaaaaagttagccaggtgtggtggcacatgcctatggtcccagctacctgggaggctgaggcagaaggatcctgagctgcaagctgtgatggctccactgcacgccacccgggtgacagagcaagaccccatttctgtgtgtataaatacatacatacatacaaaaaatagcacacaatgactacaatgtaagctacaatttttgaaactctcctttcttaaataacccagcatctgtgttgtcacactcctcagacactgctgaaggttgtcaagaagtagctaatatgaccattgatatggttttgctgtgtccccacccaaatctcatcttgcactatagttcccatgatccccacatgtcatgggagggacccggtgggatgtaattgaatcatggcggtgggttcttcccacgctgttctcatgattgtgagtgtctcatgagatttaatggttttataagggcagttcccctgcagatgctctcctgcctgctgccacgttaagacgtgtctttgctcctcctttgccttctgccatgatcgtgaggccgcccgagccatgtagaactgtgagtccactaaacctctttttctttacagattaccaagtcttgggtacttcttcatagcagtattaaaatggactaatacagccatctatttgactgatttttttttcttttttgctcaggaattctgatcacatgattttaaaatacaagattttttaaaaaatcagttatttgccatagattgagggtaggacagtggaatcacatgcagtaatgttgacctttgtacttccgtaaatctctctaagacttttttgaggcataggaagttctaaatcctgctcaatgctgcttaaggaaatgctttgttcaggctgtttttagagaaaacagtcaataactatgcttgtttctttgagttcagctgcaccagctgctgacttaatgacactgaaattaggaagttttgttctagtggtggccacacagaagctccattggtatacccaaagggttaccaaacaaaatattttttaaacaggcacacaccaacacacatgtccacaaaatacactatttgcaaaatggaataaggagtcaaatggcccaaatacaaagtataaggattgaggggggaatgcagtgtgagggaagaaccccaaagactaaactccaatcacttcatttacaaaacaaaagctgaatttacttttgaaaatattttcctaagagcacggggcatgctatgtctctagttatcattatgcatggtcgcatacataaatttaataatgccaatagtaacagcaaagactcaaacagaaggaatgccttgttaataagctttgcaatctttcttgccccattttatattttcaatagaagcactgcagaaatatacataacccagcaatctatacctgtttactcttatttagaagacattttctataggctgagaggctggaaagctagaaataaccaagtaaaagaatcactgattaaaaagcaatgtaaaacactgtcccttctgctactgttttctcattcgagagagagagagagtgtgtgtgtgtgtacgcatgcacagatgcatgtgcacattttgctactctgaagcactctttttcggtatgtcaagtcaactctaaaacatccaagcaactctagggaagtacaggagggatgaacaaacccagtgagctctgataaactggtacaggaagacagcatgtgtcctcttgctcccagagaaggaaatctgccaagaggccaaacagggttctaaaacctgcagaaggtctcctgggacagccttctctaacttaaaacccaccaaaatatccactttccctatcatctaactggactctgatcttacccaaaactccataattcagtggatcccaggtaccaggtaccattccaatgcttggaatgttcctggatatcaatgattaggcccttatggcctaatcacctcttaaaggccccacctcttaataccatcacattggccatgaatttcctttttattttttaacttttatcttaggtttgggggtacatgtgaaagtttgttatataggtaaactcatgtcatgggggtttgttgtacagattatgtacagattatggaggattcatggagaagggataccaaagttacctgtcttaaccaactacatcctgatggcttaagcctggctaaagctggcatgttcctgactagaaaggggaaaaagacagacaaatgaggaagtgacagataatgcttggactgttcctggatatcaaaaaggcataatttctacaaaggaactgaagcacacagcacagcagtatgccaagagggctcagctgtgattctattcaattcaacaaatatttattaggcatcttctgccaactcaaatgtaagaaggattccaaattgtatttatatcctcaggatataaaacagtgctggaacagacagtaggcacttaataagtgttgaaggaaggaataaaaggaaaggaagaaagggacaagaaggaagggaaggaaggaacgtctacagagcaggaatttactaagcactgaggatgtgaagataaaaaatatggcaaattagcttcaaaggttctggccagtgatttagtcagggtccttttctccattttctaatctagctttggtttaatcagtccttcttgaaggatcagacagataaaaggtaagctaggttaaaaaaataataataagctgcaggtttctgttactaaaatctgatagcaagaatgtaaagcaatggctctcaatcctgccacacatcagaatcatacaggaaacttaaattggctaactattgacatgtaggtcccatgccagattaaattacccattaaattacaatctctggggagtaggtaaaggtactggtatttttaaatactcatgtgattctaatctgcatcaaacattgagaaccactgatcattaaacaatgctatgtaaagttttctgcctatattccactgtgaacttaataagcaaaaacataaatctacatttaataaccacatgtatgtttatagctcctcccacaatataggaaactcatacctttaaacaaacatcaatgtactttgtttctctgactacacacaaaaaagtggaaaaacagtaagacactgatataacaacaacaaaaagccatacacacaagacaggcattttaaacatctagtaaaattttcccagcccagcacaccagcagaaagtgtctctaaatggctgagaaataattacagtgtaattaaaggttttcaaacacaattctgacattaacttgaagattaattattttgttataattacctatactttcttaaaagcagctctgctctttacagccaaaaactgaaaacaagccggatatccctgaataccactactttaaaagtaggttttcttatgttctaaaattaattgtggtgatggttgcacaactctgaatatattaagaactaaagaactgtacattttaaataggggaattgtatggtacataaattataccttgataaagctattatattttttaaaagaaaattttaaaaggtagatttactttcttcactatatttaaaatacgactgttttcataattgcacatcttagtgcatttgtgctgctatgataaaataacctagattataaaaacaaaataacctaggtaatttataaagtagagaaatttttttcctcacaattctggaggctggaaagtccaagatcaaggggctggaaggtttgtcagacaggtgaggggtgttctctgcttccaagacggtgccttgaccctgcattctttggaggaaaggaacactgtggtgttccccacacagtggaaggtggaagggcaaaggagctgaaggctatgtgaagcctcttttataagggccttaatcccattcatgagaggagaagccctcatggcctaattacctcttagagatcccacctcttaataccatcacattggccatgaatttcctttttattttttaacttttatcttaggtttgagggtacatgtgaaagtttgttatatacgtaaactcatgtcacgggggtttgttgtacagattatttcatcacccaggtattaagcccagcacccaatagttactctttctgctcctctccctcctcccaccctccaccctcaagtcgaccccagtgtctgttgttcccttctttgtgttcatgtgttttcatcatttagctcccacttgtaattgagaacctgtggtatttggttttctgttcctgtgttagtttgctgaggatcacagcctccagcttcatccatgttcccacaaaagacatgatctcattctttattatggctgcatggtattctgtggtgtatatgtaccacattttccttatccagtctgtcactgatggacatttaggttgattccatgtctttgctattgtgaacagtgctgcaatgaacctaagtatgcatgtgtctttatggcagaataatttgtattcctctgggtatatataaccagtaatcagattgctggatcgaatggtagttctgctttagctctctgaaaaattgccacactgctttccccaatggttgaactaatttacactcccaccaacaaggggacacattcaaactacagcactgtatttggactatgagtactccacaaaatattaaatcatgttttaatatcaaatctcacttctttttcatgttcttctatactcaagggtatattctatactaaaagaattatggcttcaacctgtagcaaaattttgaaactataaaagttaacattaaaaacttataattaacagtataataattagggggcaggggatgaaatgtgattaagttagtgaatcactcagagtgatgcaccgaaaatgaagcaggcctaagagcaagaagtcccaaatcctagttctgacccccatcatttgtgagatgagtaaccttggacaattgactcaaaatggtgataaaaactgtaaatcacaaattcattctgagaataaactgaagcagtgtttaagaaatcatttgaaaattgtttggtggctttaaaaagtgttgaaattattttggctttgttgcaaaaagagaaagaacaagttctcggacatggttactttgtccaggaatctcccaaatttagttctctgcccaattttccttgtagcatcagttaaactgccttaatttttcttgtctatgtattttctcatctataagagggagatgtgtttgtcttttaagaagttattaaacttctaaattaagtcctccgcttcactctggagaataaatgcagctgatgtaacaaactggtggcctggcttctttcatctgccttttagaccaaggaagatacagtgtgtttttgtaatattgcagcgactccatgtgaagtttgtttgtttgtttagtggctttctgacaagagtcccagccagccaaactgaaggaaagcagttactgaggggcatgggagttctggaacctacaagagcagatttacacagtggatcttaatcaggaggagtgcgcatttacagtcaaggagaaaagccaaaattccatgcatagaagtataactttttacaattagtctcctctttcataaattgtcacagtgaagctctgcaaattacttgatcccatttcaaaaaattgtacttttctccaaagcacataactgttaccccaaaagacaaaaaccatattactaaaaatgttttcatctagaaacagaagacacgtgcttgtggaaatgtttcaccaacctttttcaagcattagttaaaactgttacaaggcataattataaatggccatacatttaacactgttacttaattaaatatttgactgttttgtaaggattacttgttatattaaatttcaaatttccataattgtgtgatgatatagaaatatatgtatacacccacatttgtgtgagctgctcaactgtaattaatgatgcacttttattctctattattgtgtggaaaacattctgacacaaaataaatgaagcataatcattcagagtaatgattcaaatgtactgattaatgataccaaataacttctctgttcctgagttaaattaaaacatttatagcctgggaattataggggtatccctaaatgagtgttttgtagacaatcattttccctcacaggaaccacctacccccgtcactggaaatgagttcctagagattgtaaaatgtaccgtattattttaagtgcaaataagagacaaaaactctatccattaaactattagacaatgccaaatcgccttcagagacgtttaaaagcaggtcaggagagagtgggagagaatatgcctgcatcccagacttgatatacggtattctcttcccacagtaggcactcagtaaatgtctatcaaagagacatttttcaaatgttgcacaaggtattttcaaacttctttaaaatttgaaataagccagtcaccagaagaaatcacttatatgaggtacctaaagcagtcaaattcgtagagacacaaaatagaacgggtaccaggggctgaggggaatgagaagttactgtccaatgggtaaagagattccattttgcaagatgaaaaaagttctggacatgtatggtgctgatggttgcaaaacaatgtgaatatacttgatgctagtgaattgtacgctggaaaatggttgtgctggtaaatttatgttacgcatattttatgacaattaaaaataacaaaaagatttccataggaaaagaacagtatgtaagatggactcgcaaaactataaaactctcgatctggaaaggacctaaattcaacccaacttaacaagataacttgataaggtaactttccattgaaaactacttttgcagaaatactgagtcctttttcaatggactggtgagaaacttgcagtttccaaacaaaaagtcttgctgagatagcgcttcacacaactagcttaccatcagaatcaccatgggcttttaaaagacttccagacaactcacacctattaggatggctactatcaaaagaaagaaataagtgttagcaagaaagtgaaaaatcgaaactcttgtgtactgttggtaggattataaaatggtacaactgctaagaaaaacagtatggcggttcctcaaaaagttaaaaacagaattaccatatgatccaacaattccacttctggatatatatctgaaaggattaaaagcagggtcccttgctacccacattcacatcagcattattcccattagccaagaggtggaagcaaacccaaaagtccatcaaaagatgaatggatacacaaaatgtggtagacacatactatgtactattattcagccttataaaggaagaaaattgtcacatgctacaacatggaggaaccttgaagacattatgctaagtgaaataagccactcacaaaaagtcaaatactgactgattccacttaaagttccaagccaggtgtggtggctcatgccttatcccaattctttgagaggccaaggctggaggatcacttgggcctaggagttcaagaccagcctgggcaacatagtgggactccatttctacaaaaaaaagttgttttttttttaagttagctggacatggtggtgcacacctgtagctacagctacaatggaggctgaggtgggaggatctcttgagcctgaaagttcgaggctgcagtgagctgtgatcacaccaccacactcaagtctgggtgacaaagtgagttctggatgcctattgcacaacactgtgaatatataatacttaacacaatttaactgtacgtttaaaaatggttaagatggtccaaaagaaaaaaaaaagcaacgtatatgttagataagtaaataaaagatttcctgcctcccatcccaagcctactggcttagaatttccagagattagggtaaaataactggtatttctaaaaagcttcccaggaaatggctccacaatcaacagagatctatcaattccattagtttccaacttgtaagtaactaaaacacaatggcagccatgtttaacatttcattttgtgtttaagactgtttataggtacacataaagtatttctataagcaatggaaattgatcagtttgacaacatcactaaaaaaggtagggtgtggattttaatactggtactgatgaggaaagagacaaaggaagccctttaagtctctctctctacaacatgccatcttcctatcactgaactgataacagtgggaggagccctagtccactgacagcagctctacctgcatcatgcctgtggtttacacagagccccaagtcttcctccattgggtgtgcaaacattcagaaagcctctggtacgaaatgaccaaccagtaccaaccctggtccagagagttctagaaaactagtcaaccaattaaacagcagtgtagtaaaagaggcaaataaaataggtctcataatctagccctgccacataactgccaggtgatcttaagcaagatactgactttgattacattacagaaaaataacagggatggtactcgcagatttgtcatgaaacttccactgagataatacacatgtaaaacatttagcacaataaatggtgtaaaataggtattcagtaatcaaaagatgacattttcactgctgatgcttctttcatctcgtcttttataaaaattaccttaagtactatagatttcaggactaatcattccctaaatatgtactgatttttgtttctactcctaatttacctcaaggaccatgcttaatagtattacatttttttctatgtcctttgaagctcatcacatggtactaagcaatcagtagacatgttatttatcaacttaaccattcactcaacagacaatggatctgccatgagcaacgcatcatcctaggcactagaatacactgatccctacccctgagtttatgatccatgctcaataaaatctattctgttttattgaattatttattgcaacagcagaaacacatatatatctttgcatacaggcatggaacgcctccttccatagatttacaataacctattctcctatattactcgtgccagagaatgtcagaaaataagtcaccttatttaattattaaaactatcaatttcaactacgtagacaactatagtgtctcatgttccagccccctcaaacaatgggttggtctaaaaatgaaaaatgtctgtacatgcccattagcttgtaaaagagccaatgtaaaaccaaagaattgttacctaattaaaagtaatttgctgcaaaattattgattcaagaacaaaagaaattcacataaagaaaaatattttcggccaggcaagctggctcacacctgtaatcccagcactttgggaggctgaggcaggaggactgctcgagcccaggaattcaagacaaaactgggcaacatagcaagaccctgtctcttaaaaaaaaaaaaaaacaaagttagccaggtgtggtggtgcgtacctgtaatcccagctacttgggaggctgaggcaagaggatcacctgaccccaggagttccaactgccatccagccttcacaatttctctccaatccacacatatccttttcacatgtaaaatttctcccagttaggaaaaaatataagtgagctaaaaaacatagcttgagctttcatagctactccactatactatactacttatactataggtagctaagagattatgtgatattaaactaaagattctatcaatagtctatcaattttctccattcatttagcaccacacttggttctccccaacccttttttttccaacccctctgacaccctcacctccactattccccagattttacactgtgtgctgacttaaacatctgctctgctaagaaagaccaaatacaagttgtttttagtgaagatgaacatgtacatatttttgtataagatgagtatctagtttgctatttctggcaaaagggcagggaacatccaaggttgtcagtataacttttatctcttgtgatttaactggacctttagcaagcacagaatataacttcaaaagaaagaaaggattttttccatgattaaacaaacaaagccagggagcattttcccggggcagggaaggggaggcacactgacagaccttccggcaagagttaggttagttaaaaattctgagggaggaaaagaagaaaatacaagaattactgttgctacattaagcaaagcaaaacaagtacaggcaaaataaagaaaaatgtttcaacaaaggtgacaatatgaaatttaaaaataaggaagagtgacttgacaaagtttaccttgggttatctgacaacattgaaatgggttggacaaagtacacagtgagctcaaacatcctggctttaaaagcgtggggcccacagtcaggcatcatctctagatcatccattattatctgtcttataaggagtaatggtaatttagacaaatccaatccaatttattccatcaaagatgtattgaggccgggcgcagtggctcacgcctgcaatcccaacactttaggacaccaaggcaggcggatcacttgagcccagagaccagactgggtaacatggcaaaacactgtgtctaaaaagtgcagaaaaattagcccaggtatggtgacgcgtgcctgtagtccccgctactcaacaggctgaggtgggaggatcacctgagccccagaagtcaaggctgcactgaaccgtgattgtgccattgcactccagcctgggcgataggagacacacacacacacacacacacacacacacacacacacacacacacaaacatttaatacattctcatgtacaaaaactctaagtactctaggagagatacataaatccaagtctaagatgtgtttaagtaactcataccacagctaattttcaaaagtttgtccagttaatattgaattgagaatttggctcaacaatatgagcttgacatgttttatagctcaaacataattgagtaatggcaatttcataggttcaacggtttgtataatactgatattaaaaggtaatgaagtaactgtgaaatagaagtctaggcaaaaagtctcttagggtacagaaattaaaatgcaaaataaaaagtaattcattttgtctttggaaagcaggttggcttcttggagcaggtggcatatgaactaggcagaagtttttgagatttggaattattagaagagagaatacagtgagatagggaatggcagatggggatttcagactggaaaagcaagatttcttatagcatagaatcataaagtgtaacagaataatttaaataataaaatcatctattttaatgttaccgaacaagtacgtgaggttcactattaaaaataatttagaccaaattcacttggagacttggatattacgtctcataaccgaatgaacagggtgatgtaacaaatataaaggttttctgatcaatgataaaagaaaaattaaataagagaattgaatcaaccattccctatgaaagggctaccaactttctccatttcagaaaagtgtcaacataaaacactaaaagctcctcactctattacaaatgcagcagaatcccacagatcatcctattctgttccgtgatggtcaacagacttccccttgaccattgttctcatggttgtctctgccccaaacaccagggtttttataaagtccccattagattttaaaggtcaagttcttcctaccactctgcttacagatcactagaagtcaccacgaaacatttaccatgatagcggcaaattttaataatcactagaatgtattgagtagtttgtgggaacactggcttctgcatgattttgaggatggtaatgaagtctaatctactgctccattacacatattattcttagccacaataacagtgttccgtttgagctttagggctgtatttaaatagatggtttaggaaacaataaagcctaaaagaatactgtaggtgtattccaaatttagtgtgagtaggaaacatcaggggaattttatctactccatcaaacaataaaacactctgagccagcaacacaaaggagccaaaaaaaaaagggatgggaacattttttccgcttatttgaaagccagtgtgctaataaaaatatccattaaaaagcatatcaagtcttttcattatagtttgcaggaggttttgttggtttttttaaaagagaaatgctatatattatgctagttatattacataaacagtagagcttattaataccctacaggtctatatcatgatccattaaacaagcaagccaagggaaagaatggagttagatgaccacgtgaaagaagaatgagacagtcctgcagagaaagacacaaacatccaagaacacatgaaaagtaccagcaatcaaacccacgtgaccaaaaaaaagcattctagttgctcaatctttcaaaacatctttactgaagacctttagatattggctgtgttttcatgaacatatgcaaaaacggggatacctcatcacctgccccaagggtcatataaaataatgttaatggctgaatataaaatccacagttcggaggttctttcccaggtaaagtccatgacaatgtcaaagcctaacacaagaaagacgtagctcatattacaacaagcaccaccataaatgccctgctaccaatcatatgccttgagcacttgttatgtatgagacactacactaatgagcttacacataattcactgaattctcacgcttccttgaggtagctgctgttattgtcctcatttccagatacaaatgtcaaattttagagagacctaaaaatttttctaaagtttagcagccttaaataatggagcagggactcaaccagacatttgtaatactggtcctgaactgtgatccactagccagcgggtttctaactttaaagctcgccacaatcaacggacaacttgattgtgcaccaattcctgggcaccaccttcaaaggttctgatttagccatctggggttaagcccaggactctgcatttcaaccaacacttgtggtaattctggtacaactgtctgtggagcaaataccaacttctgagcagaatggctattatctgcactggaatagagattgctggtacctgctaaaatgctaattaaagcaaaggattacctgcaatgatgaaaaactgcagtaaattttaaaataaattttacttttaacctgctttatatttttgatatatattatatataaaattatgaaagatatattgagtttttaatatttcatatattttaaaagtggtttaaactttaaaatcaatttttgttttaacaattaactaaaggaatcactaatttttattattattattattattacactttaagttttagggtacacgtgcacaatgtgcaggttagttacatatgtatacatgtgccatgctggtgtgctgcacccattaactcgtcatttagcattaggtatatctcctaatgctatccctccccctccccccaccccacaacagtccccagagtgtgatgttccccttcctgtgtccatgtgttctcattgttcagttcccatctatgagtgagaacatgcggtgtttggttttttgtccttgcgatagtttgctgagaatgatgatttccaatttcatccatgtccctacaaaggacatgaactcatcatttttatggctgcatagtattccacggtgtatatgtgccacattttcttaatccagtctatcattgttggacatttgggttggaggaatcactaatattttaagcatgggtaggagttgatgatcacttgctagcatttttgtttaaaggcttaaaactattatattgctctttgtatattccaaaatacatactgttgacccctgaacatcatggaggttaggggtactgacccctacctcgggcacagtgaaaaatctttgtgtaatgtttgactccccaaaaacttaactactaatagcatgctgttggccagaagcctcacagataacacaaacagtagattaaaacatattttatatatgtagtatgtcctctgttcttacattaaagtaagctagagaaaataaaatgttattaagaaaatcataaggaaaagaaaatatatgtactcttcaagtggaagcacatcatcataaagacctccatccttgtcgtcttcaagctgagtagggtgaggaagaggaggagttggtcttgctgtcttggggtggcagaggtggaaatatatccacatataagtggacccatgcagttcacacctgtgttgttcaagggtcaactgtgctgtctggaacattttgtttatgtgcccttgaggatgatgacaagctgtgacattatttagcagtaatgtgatttggggttaattctgacaataatgtgaacaggaaatagaaagcatggcccaagaagtgagtctcagatagaaacacaagggacaagaagctcaggcaccagcaaaagtatgtgaccgaacgtcgacacaggtcctctgtcagaagttatataggtcagagacaagacagaagggtttaaaaaaaattttttttttttttgagagaattttctcacccattaaagtagctgatgcccctgggctctaagaggagaggctcagtttcactgcaagagtccagaatcttctgccaaagcaatctcacaatagctcagagtcaaggacagctgcacgatatggaggaggggctcaacgtctgctgaatacctctctgggcttcaactatgtgccaagatgtgtgtcagtcaagtgcttggctaaatcagtgatgaagatgcactccctgctctcgaagagttaataatctgattgagatcaggtttctagccccagcttgtgtcagcttctagccatatgattccaagcatgtcacttaaaagttcctgagccccaggttttgttatttggaaaccagagataacatttcttcagtgtgttggcatcaaatgagaatatctgttaagtataatatactattatctgtaatgtataatatactattaattggtgtttctcggtgtattgtgtaaaagaagccagaactgggctatcaaagaagcccaactgatgtacacacagttaataagcagaaaagaaggaactgcccatttcctgcactcaagtgcattcttaacaaagagaacactgatgaggggcatgacccaggttagttctaccaatatactcttattccttgaaacttcacagggacgagtgattggaggagggagtggtatcctacagactggaaaacaaaagcatggtcttgctctctttcagcatcatggggcacaaagagatacaaactccacaaaccatggtgagcttggcccaaagacaaagcaattcttactatttatcaaacttgctcagaaattccagcaagcataaatactctatttcagaggaatttaacccaccatagaaactattacactgataaaaagtgtggctatagctttttttttttgagacagtcttgcgctgttgcccaggctggaatctcctgagttcacgcaattctcccaccacagcctcccaagtctctgagattacagacatatgccactatgcctggctagtttttatatttttagtaaagacggcatttcaccatgttggccaggctagtctcaaactactgatcttaagcgatccgcccaccacagcttcccaaagtgctgggattgcaggcataagccaccgtgccgagccctagatctttcaactctagcatagcaaaggacaaaaagagaaagatgaggactattcagaaatcaatatatggtcatcacatggtactctgatgtgcataatctgacctacaagaaagagcacagtgctggggttctgaacatttgggttactatctgccctctgccattatacagatctgcagccttaaggtcattcaatgcctaaacttgtacttctgaaaagtgagaatggtcatattaactctacaccttttttacagggctttcatgatgaccagatagggtcttgaatgtgaaagcactttgaactgttaaaaatcactcacaaagaatcatgactaaagatataaacttcacttgtatgcataacaggatgtttcaagacaataagatttaattttctggattgtactgtaaaccactttatatgcaagctcttaaaaaataaaacgcctgtgtagtaaattagtacctctagacaattctgctatctctgtgacaattatttctagaattctgatgcgtaattatcaaaaaaagtagtaaaaccctaaatacaaatccaagcttaacctccatgaagtttattttactttattaacactatatgatattcattgcttttcaagtaaatgatggggtaaatgagtcctataaacacatgcacacagagtcaaggaaaacttccacccgccccctacaaaaaaaggtggagaatcaaagacacacaggctcaggttcatgaatatagtagattcattccatttttaaaacaggtattactgtgttctctttttaaccctaaaaggaccaaatatcttcaaaataatgatggtggtgactcttcattcctaggccattttatcaaatataagtgtatatttagatagacccatgaaaaaataacaagttgaaaattccacagataacctaattatctaggtatttaaaaattgtgacaaagatactactataaaaccacaaacagatatttcttattatatggatgcagaaatcctcaaaatagcaaaccaaacctagcaacatgaaaaaattaaattatataccatggccaactgggattcatcccaggtacgcaaggttggtttaacatctgaaaatcaattaatgtaatgcaccatagcaaaaccacaggatcatatggaaagatgcaataaaagcaattgacaaaacaccatttattgaaaaaaaaaaacataaatcaaactaggaatagaaaggaatttccttgacacgacgtaacatgcagggggaaaaaaaaaaaaaaaaaaacaaccatggctagtatcatacttaaaggtgaaagatagatgctttacccctaagatgaggaataaaatactcatgtctgctctcaccactccaatttaacattgtgctagaagttctagccaggatagtaaggcaagaaaaagaaataaaaggcatccagattggaaaggaagaataaaactctatttgtagatgtcttgatcttgtatatagaaaattctaaggaatacactgaaaatacattacaactaataaatgagttcagcaaagttgcagaatactaactcaatatacaaaaatcaatacaccttttatatacttgtattgaacgatccaaaaacaaaattaaaacaattatatttataatagtataaaaagtaatgagatacttaataataaatttaacaaaagaagtataaaacctatactctggaaactacaaaaaaattattcaaagaaattaaagatctgaatgaaagaaaaaacatcctgtattcccagattggaagactcaagattgttaaaatgtcacacatatcctctgcctccacacatgcataacctctttcattatcaacatcccatatcagagtggtacatatgttacaattgaggaatctactcccaaattaatctacagattcaatgtaatccctaccagaatcataactgacttctctatcaaaatcgacaagctgattctaaaatgcatgtagagtctaataaatgtatactggtgggtcgctgtggttttaatttgcatttccctgatgactaatgatgatgaacaattttccatgtgcttagttgccatccatgtatcctctttgataaagtatctcttgaggtctgtcgcctgttttttgattgggcttttctgctactgttgagttttgagagttccttgtatattctggatagagccctttgttagatacctcatttgtgtattcttctcattctgtaggttctcctttattctcttaacaatgtcattcacaggacaaaactttcaattttgatatagcccaattcattaaaaaacataaaaataaaaataaaatttgtatagaaattgcaagagatccagaatagccaaaactaccttgaaaaaaaaaaaaagaaagtaagaaagctcatactcttccatttcgaaacttactacaaagcatcaagaaacaagaccagtgtggttttagcataaggatgtaggtcaatggagcagaattcagagttcaaaaatgagctcatgtgtctatggccaatagatttttgacgggagtaccaagatcactgtatgaaaaatcaagagtctttttaacaaatggagctcagataactggaaatccacatgcaaaagaatgactttggacccttgcctcataacatattcaaaaattaaaaatggatcaaagaacaaacattcgaactaaaacaataaatttcttagaagaaaatacaagggtaaattttaaagacctatgacttggcaatgatttttagatatgacaccaaaaccacaagtaacaaaaagttaaactgatctttttataatacctccgtagttttgactctcctagaatgttatacagttggaatcatagagtatgaagacatttcagatgggcttctttcactcagtgatatgcatgtaagtttcctctatgtcttgtcatggcttaatatttcatttctttttagtggtaataacattccattgtctcaaggcaccacagtttcttcatccatttacctactgaagaacatcttggttgtttctaaacttttagcaattatgactataaatgtaaaaggagtagtggttgccaggattagggagagggagagatcaacaggaagagcacaggggattttaaggcagtaaaaaaaaacctctgtatgatagtgtattagtggttatgtatcattgtgaatttgtctaaaagctatgaaaagccaacaccaagagtgaatcctaatgtacactatttattttgggtgataatacatcaatgtagattacttaattgtaacatatgtaccactctgataggggatgttgataatgaaggaggttatgcatgtgtggaggcagagggtacgtgtgacacttttttgccttcctcttaattttgctgtgggcataaaactgctctaaaacaaagcaacctttaaaaaaaaaaaaacccagacgtggtggctcacacctgtaatcccagcactttgggaggctgaggcgggcagatcacgaggtcaagagatcgagaccatcctggctaacacggtgaaaccccgtctctactaaaaataccaaaaaagaaaaaattagctgggtgtggtggcgggtgcctgtagtcccagctatctgggaggctgaggcaggagaatcacttgaacccgggaggtggagcttgcagtgagccaagatcacaccactgcactctagcctgggatacagagtgagactccgtctcaaaaaaaaaaaagaagagttggacttcatcaaaatcaaaaacttctgtgcaaaggatactatcaagaaaatgaaagtcacattttgggaggccaaggcgggcagatcacttggggtcaggagtttataaccagccgggccaacatggtgaaaccccgtctctactaaaaaaaaaaaaattagccgggtgtggtggcacttgcctgcaatcccaactacttgggaggctgaggcaggagaaatgcttgaatcctggaggcagaggttgcagtgagctgagattgcgccactgcaccccagcctcggcaacagagactccaactcaaaaaacaaaaaaacaaaaaacaaaaaaaagaaaaaagaaaaagaaaaagacagcctataaaatcggaaagaatatttgcaaattatacaagatcctagtattcagaatatgaaaagaactaaaactcatcaagaagacaaacccaatgaaaaaatgggcaaataacttagacatttttcctaaggagacatgcaaatagccaacaaggacataaaagatgctcaacatcgttagttatcagggaaatgcaaattgtcaaaagtggcacctgagaaagaagcttcctcgctcactctcctgaaagaggtttcagaagcccacttccttttcactgtacaaacaaaaaatccagacaacttccttctcacaactacgcacttgaggggaaccaggtggaatttaatgtggatcagagagacagaaagaaactggatccatccttgatggcactgttgagaagttaaaccaaactaatcctggagacctacctacatctgaactttctatcattagacaaccaaagtcccttttattacttaagcctgcctgagttcattttctttactcaaaatcaaaaatcttaactgactaaatcacatagttaagaaatgctacagcgggcggataactggagcagaaatataatcttggaggcaacagtgttgaaatggctatttttgaagaaaggcaaattatgttttcctctactgtactgaatcatgtttcaaagcttcacccagaactttatgttagacagatctttttccagctcaaatgtgttacctgatctccgttccatatttccaacattgtgagcacatccactcaaaataatatagcataaagaataagaaaattaaaatacagagctcatagaattgggcaaagctggaattccttttaatgaaaaagaacattgtaaactataaataaccataagatggtcattatcatttgcctgtgaataacttgaaggaatcagactaaaagaatttttaaggaacattccagctctaaatgtctgattctgaagctttccaaaatatataatcacatttaaaaagaaaatagttaagaattgactccaaaaagaaaaaaatatatatataaatatatatagtgagagagcctgtattcaacacattaaacctcagatcatttctctaggtaagtaaaataaacaaaaatataaactaatgtaaatgagcattactttggtttaaatagcaatcaaccactctgacttcaacatgttactcaccacaaacatttgaaagtcattccttcttaggaaagggctatttttcccaactatttcagagttcattaggagtatcagtaaaatgcaaaaaaaaaaatacaatagctagttcatatttacacaacacaaacatgtattcaacactttaaattagtatatttgatacatgctaagtatataattttaaagccatttcagatgggcaaaagtagctaggactacaggtgcccacctctaccttatatatagactaagctcataaatatctgtcatatacatgcacaaatatatacagacacagtagaaaaggtttaaaatctcatttatctacttgaattagctatactttcgtcccttggtggccgagaaagcaaagaacgatggtttttattaataataactataacatttacattctgcaggaatttagaaaatagttcttggctttaaaaagtatatgaatatgcatttgtggaggggaagaaatgatccatggtataatggacttccatagcactgtgcattttcctttacatatcatcattttcttgatatgtaacctgccatggattactacttggcttatcaactctcactagatcatgagtttcaaatgcaaaagaactgggccaggaatctctaggatcaatcacaatgcctggcacataggaggtagtaaatgcctttccaccccacaaccagaaaagcttttctatcttttcttttttttttttttgagatggagtatcactctgttgcccagactggagggcagcggccccacctcggctcactgcaacctccgccttccaggtccaagtgattctcctgcctcaacctcccaggtagctagaactacaggtgcccaccaccacgcccagctaatttttgtatttttagtagaaacagggtttcgccacgttggccaggctggttatgaactcctgacctcaagtgatccacccacctcagcctcccaaagtgctgagattacaggcgtgagccaccacgcctggcctcttttatatccatctttcatttgtaaagcatttttgaaactacatatttccagtataaaatgcctcatgtaagtaatatattttacagttatcctacacattgtatgtagtattatttcctttcacttgttttatagttaatgtgtttcaattttcatgggaaaactcagttctaataaagatttctgagttttgatacaataaagtctgcattttatggactctgatcatatatcctccagactgaaaagttcacatttttcaagtctccagacaaaacaaagatcagtcatctttttttcagatcatgtctttttcaagatatgattaaaacccccacatgggattttggatataaaatttcaaaagtttatagcaatataattatattcagtgaaacctcatcttttttagaatcctcgaggaataaaacctctgagacagtacagtttttgttacagtgaatacttgtagtgccttttttatcgtatttttttttccttttggagacaggatctcactctgtcatccaggctggagtgcagtggtgtgataatagctcactgcagcctcaaactcctgggctcaagcgatcctcccacctcagcctcccaaatagctgggactacaggcatgcaccaccatgcccagcttattttgtgtgtgtacatagagataaggtcttgctgcatagctgaggctggtctcaaactcctggactcaagtgatcctcccacctcagcctcccaaattgttggaattataggcatgagctactgtgctccacctttcattgtaacttttaagagaaatgtttatgtgtggcattacatatttcaattccttacaaagactagactgaattaaaacaatttaaacccttcttagtgatttgggttactattttgaatactgaggagctacctctccctagccccaaatttgttgagcccagaattgttggggtgtgtagggttgtcttcactgaggtatttcaataacatcaaggacccaacagttccacatagaaacacacatcctatatctctcacccctttgtagaatcgtctgacagaagtagtggtctctccacctagatccccaccattttccatcatttcataagttagctggtttggtctgaaaagcctcaacttaagtacacctagaacagttgttctccatcacattatttgctggtgagtgcacataggctctttctgaagattctcctctttcccttttagttagaaagctcagaaaacttccatttgaattgctgatactgaaaagtaccaagttcaagcaattccaaaagctttccacaaaatggactacaagagttcatcattctaactaaactctaagcttcatcgtaaattatctttaccttcttttgtacccactgcccctttcactgatattcagcatggtgcccagaaaatctaaaagtgaactagaccacatataactacaggaagaaatcccctctctctccagcacagaaaacaaagacagggaccaaagattacaatcacaatgaacttcaattcaaacctcacagaatcatctactatgcaagatgtacactaaataaaatgtggtcgagattcaattacgtaagttgatctcttcagagaaactattttaatggcagaaacaataacctagggtttcttttaagcttttgaaaatcaatattcataaatcatgtttctgtttcctaggaaactaggtaatacctatgacgagaaaactctaccagtgtcattttccttttatccttggttcacaacgtggttactgcttactagaagaaaaaaattaccttctagtatcattgaatatcacaatgaaatgagaagggagatacatagaatgccaatttctcagactgcatctccttctcaggtgtgacagagaattaacagaataaatgcctgcacagagagctccaaaaaggtggaaaacagtttataatctagtttattatgtgctcaacacagagcatgacattttgaaacaaaggagttaaaagcctggatttgttagaaacatcaggtcagacacttccaagttcaaattccaaatttttttccccttgggtaaattaaaattacttcacctctctgaactacagtttccaagtcttaataaggagaaaagacctagctcacgttgcagtatatgaatacaatttaaaaagaaatacaaaataccaagttcaggattaattttgtctctaaagaatctccaagaactacgtttaaagataacaaaacaggtagtttctcaaggactttatgaccagtgtataaggtttcttttttgagttcccatcttagaggggttacaaagggacatggcatccttagaaagtttaatgagtgtcatttctacaaacatctgtgcatgacctttcaactctgaaaatgtgatcattttatactgtacatctgtgctgggaccacattacctaagcttgctctgactttcatatcaacaatcaaatacagaaagaaaactgatgcacaaatcacaacatggttgaattacacacttgactacagagtttattaaaacagtcttgaatttctaaaatccattattaaatcacagtaaattgtagggtatacaaccctggcccaaagatccaaagacttcatatgctgctgagattcactgttttaccaaattcagacactggagaccatcatctcaatattttaaacacacgtttaggtatcctcccaaacatttaactgcacagaatacttgaaaatacaattttatatacatatatatatatgtatttgtgtgtgtgtgtgtgtgtgtgtatgttcatgtgcttttattagttaaatgtctgcaacggcatagcaactttttcctaaagcagcaacacataatttccccacacttcagaccccaactccacaaactgctcctccaaatatatatatttttaaatattccttttgacttataggtacatctgctgacccaccatgcagatattcagaattcaattttctactctgtgaaagaatatttatgtatcaaacaagagagactaaaaaatggcaacaaccaactggctaatcttatttttacaggctactactagcctcgactatcaaatagatatttagaaactgcagctttaatttccatatgctgacccttctgtatcattaaccttctcacaaaatcccagaaatcctgaccccaggaatgtaaccatttcggccataataataaagtcaattcagattttctgtttatcatacacagctgatgctgaactcactgcttagaatcttgaattacacattgaggtgagaacattgcatgcacttttattaagtgctaaaaatggtccaggtaattattaactatcaatactgcttacctcctgacaaaagcctggtactgcaaaatgttaggctaggctaatcaaatacaataatgaagataattttaaccaccaccaccacattcagaagcactaagacttttggtacagattttgacttagagccttgtggagagctaaattctcattcaggttcctacctctacagaattcaagctctatgatctaatgaaggtcactttacctttatctgtagaagatgatttctaaagttctttcaattctctatgactctgtaggcctaataccctagagccctagagatatgtatattgaatattgaatggctatatcaaacctcatagatgggttttccaacaaagcaggaatgcatacttcccaaatatttagccaatacgacaagaaagaaccattatacaaatcagactttggtaagctttgttttcaactttttgtacaaagagttcataataggcttaacattttttagaaaatattttgctaactagtttatgtagcatttaaccattattaagcaattacattcaaaatataaacaggtttatattttggcaaacaaattcacatggaacacagtattttcaaatgcttcccacgctagtatgttacatgtcatgggtcttattttataacacaaactccgcttacttttgtaaggttagaaggagctattttatgactcatttttgctactggacatatatacatcattatcattgtataaatggggttagaaaaatcactttggaccaggtggggtggctcacatctgcaacttcaacactttgggaggccaaggcaggaggatcgcttgaggccagtagttcaagaccagtctgggcaacatagtgagacctcaaagaataaaaaatttaaaaattatctgggcatggtagtgcactcctgtgatcccatctactagggaggctgaggtgggaagatcacctgagcccagcaattgaggctgcagtgagctaagatcaaggccactgcactctagcctgggcaacagagtgagaccctgtctctaaaaagaagaaaagaaaaatcactttgcactttgccctacatcaaccttcacaagcatatgaaccctttacaatataaatctcattttgctcagaaacatgagctatcaccctccaaccacgagaagaacactatgtaaaatcatcaaatcaaagtgcttctcttagattctgcaactctcagggccattcctttagctaggcttgtccctagacacatacatataatcaaactgaaataccaattaattcatgcagtaaatcctaagagcaaagatgctcctaggcatgggaagaaaacctacatgcagggtaccaaggaagcacttccacagcaccctgctatttccatttcataaaattcctcacacataattcagctatttcacccactagtcatggctctgtagaggtgaagaccatgtctatctccacttctgtagtatacctagcatgatgcttcaacacaggataaacattctttttatttaaaaaaaaagtgttgatttaaactgaaaatagaaatacatactaaacagtactgaagtataaaatggtataagtttttcaaattgaaccataaaacattcctgtattttgtgcccagcagcacccagagccatggagtgctgatgggaaagaagggcacacacacagggaagcaggtccactgacaccaagtacacagagtgtggaggggagagagagcacgcagcatggaggcacgctggcagctggcagctggagaccacggacagaggggttgtgggggtgaaggaagaggagatggtaacaggcagatgagatagggaaaataagtaaaatgattaagcaaataaatatgttgaggataacaagagccaggcttcttactacagtagcaggtatttaccaacagaataggtggaggctacagagaaccctgaactgctacactggaattggaaaaataagtatgaacttccagttttaaaaaatataatcacagaagctgggtgcggtgtttcatgcctgtaatcctagcacactgggaggccaaggtgggtggatcacttgaggtcaagcattcaaggcaagcctggccaacatggcaaaaccccatttccactaaaaatacaaaaatcagctaggtgtggtggcaggcgcctgtaatcccagctacttgggaggctgagacaagagaatcagttgaacccaggagacagagttgcagtgagccaagatcatgccactgcactccagccagggtgacagagcaagagtccatctcaaatatatatatatatatgtataaacatagatataaacacctcaaatatatgtatataaacatagacataaacactgctataagtgtatgtatttatggagtgtgtacataaaaatgtatgtgtacatgccattgaatcattaaatgatactccaaagtatagcacttgcacatgctaagcactgtgaattaagggaaattgggagaccttagaaactgcctcagaatcaaagtccgaccttcccttgtttttcaacctagcccatggaggggatctctctgaagtttcctcatctgagaaaagttctttcaaaagaaaaaaaattgccttcagctccctgtcagaaatctcatcaaccagggaaaattaatcaccaaagaagaatctgaaggccatcaccacacccacccagagagaattttcatctattctgagtgctattactgacaggcttcatctgcatataagacaacttttgttcccagaatatgtcttccccttaccttcctatagtctgttgccacctccctgcaagccacgaggagctctgtaccagactactgtccattttctggacctattcacctcccctaaagatgatttactcttcctccaaaattgcctacatccctcactttctcctctcccctgtgaagagggtattcaagcacttctttgagtttcctactttgtgtaattcccatgcgcttgcacatgaataacttgtatgccttttctcctgttaatctgtcttctgtcatcttattccagcagactcaagatcaactcttcagagggaaagtttaaacttccccacatagacatacacatatttcccagctgtccaccaagaggactcaggatcaatgagcactcagaaagctaagattatagtttctaaataccactctccactgaaggaaccagggttaactggagaaatggcttatcaggaggacagggcagagaaaatacaagatgagcctggaactgcttattgtgccataaaataaggaagtgctgaaagactaatcaggatgtgtctaagagacacaagagccaccgtggcttgcattcaccaaatataggacaatatgagcatcaaaatagagacagtaatgggttataacccaccaagtaaactaggaatctgtgacataatatatgaaaaacatcagtaaatggggaaaaagggagaactcttccataaagcagattaccagtagaaagaatagcagaaaatgaaaatcaccatttggcaacgatcactgtggtggctggtttaggcagggtaactcaataaagaatatgcctgatggaggccaggcacagtggctcacacctgtaatcccagcactttgggaggccgagacgggcggatcacaaggtcaggagttcgggaccagcctggccaagatggtgaaaccctgtctctactaaaaatacaaacagtagccaggcatggtggcagatgcctgtaattccagctactcgggaagctgaggcaggagaatcgcttgaacccaggaggcagaggtagcagtgagccaagattgcaccactgcactctaacctgggtgacagagcaagactccatctcaaaaaaaagaaaaaaaaaaaaagaatatgcctgatggatggagctttgatgagggaaagatggatattggtgtaatcttaacactaagtgcttaactcctgatagcactaaacaattacaaaggggaaaatggtgcctttgtggaagggaaagctatcagacactaacagaaacagatgatcaaaaattaacatcattggctgggcgcagtggctcatacctgtaatcccagcactttgggaggctgaggcgagcggatcacctgagggtaggagtttgtgaccagcctggccaacctggagaaaccctgtctctactaaaaatacaaaattagccaggcattttggcaggtgcctgtaatcccagctactcaggaggctgaggcaggagaatcgcttgcacctgggaggtggggggttgcagtgagctgagatcgcaccactgcactccagcctgggcaacatagtgaaactctgtctcaaaaaaaaaaaactccaacatcatcactggctgagggtcatcctacagcaggatctcagacctgcacacttaaaaactgtggaggacatgacagggaatgactgaggaaatgttccagattggtgagtatgaaaagacgtcaccactgactgtgatataattattgcatgagttcaccaccataagagcaaagagacagctttaggacagttgttgaaatctaagtaggttttatggattggatggttgtgtcatatcaacatggacttcctcccttggaactctattcacctgtttttttgaggggggcagtaacacactctaaagtatttatggatgacaggcatcatggctaaagcctgttctcaaatgtttcattaaaagaccaatgataatgggagagaggggtatgtgatggagcaaacatgatgaaatgcgaaacgtgtgctgctcacacaacttgctatacatttaaaattatttataagtaattttaaacattattatttctaaaatttgtatcccgaaactaactgtaggacactttacaatttcatcccagctgttgaaaaatttccataattaaaacatttcttaaaataggagtatccttgtagctgatcatttgaagctgtctcatggtggcaaattaaaacaatgatttgatcttcaaaaatgtgtgtgttcaaagatgttagtccagctgccaagaaatatcatcagcagtgcagcacggaaaatgccctcaaaggtactctaaatctaacacagcagagcgggtcacaggagcagggatatgttgcccactggcagtcactaatattctcctaaaagtagcctaagcacaccccccagcgaattctgaagcgcaaactccatatcttcggttggagctgtttggctatacaacaatgtgctatttgtatttaactatactgatctttttgagggaaaaacataaacaaccaaaattaaggaaatgtttcattttctttgagatgatcccaaactaaaaagacaacttccaggtcactatgaatatgtactgatgagacgtaattcaactatgcctaatttcaaatggcttgatctattacaatactatcaaatgaagtacaaagattatacataaaaacttgtcatgacaacatgggacctactttattatagcatcagtttacaaagtaattgagaaacaaatgataagttttgttagaagtctatggggttaagtaaagcctgatattgtaatagatcctgaaaagcaaatgtaatactagaaagataagaataatttttcccatggaaataattacccttaatttttccactgggaataatgggttataaaattttatcctgtattaaaatacacacacaaacacacatcccatgcaacaatagagaagcatgtacagattaggaagtatcccagataaggtgttttggggacttgtgagtcatcacatttgaacatgtttttagtatattgtttcaatgatttgtatattttatttctagacagttttgagtagtgcaccgttattcctctgtggaaacagagatatttagtgaatgattaaactcatgcactgtgttatctgacatttattcaaccgtaactgtacagctcgacatttctgcacattcacataaactgagattcataaagatgcataaggcagtaaaacttaacttgcatgttctatgaatcattaaagactgtccttcaaaacacagagtttcagtcaaaaaccaaagttttgaataacctggacccactttcttgatcaattcagatgtgactgttcactgtatttttctcctgctccctcacatttctctcagctttcttattttctgttaatggtactcccattgcccaatgtaacagactgaaaatataatatcgcttgagatagtatacaatttcctgagtcaataatgttctatcaagaaaactttttcctagtttagtatatgacttcataaatatacatatagtgctccaaattaaatctgacaacttctaaattcattatatttattttaagaagcaacagaacagcaggggaaaagagaatcacaatagcaaaccaataaagagtggtgaccaggagataaaatatggagggcataggctctcatacttgaaacttaaactagtaatcattaccaaaattgggttaggttcccccctcccccgcgatgtataagtgggcctgtacacttctcctctacagctttttacccacctatattaacttcaaaaattatttgttggcatctctttttttaagatcataagctgcagagtccacagggagttgggtcaccattacattcagtacatccccagggccaagtacagcagaagtcaatgactgtttcacagctggtaagaaagatctgttcttttagtaaataaaacagggtttattggatgactatttataaacctcttaagttggaaacaattatgcagacatgacggtctataagaaagatctggagacacactgtcaaaggaaatattgacttagcaatttcagaattcttaaaatagcagtattttctagcaatacaaatatatgagttttatatcttcaaaacagactgggttttgtccctaaatatccctaacttgattgtagactatttctttaaataaatttttaaaaaatattaatctgtatagtgaaggaaaatggaaaatcaaagaaaaataaccattatcatattttaaatagtataattaaaagcatcatacacagaataatttgacattattgtaggtttttccaaaaagcaaacaacaacaataataataataatcctgaaaaggtaagcaagggcatagacgggtagagaagaggggaaaagatctttgttaaaagtgtaaattcataggtaatgggatgcacaggctgaattcttggattcactgaacaagtaggagaaatggcattatttggcttccaacctggatgtgttaacctaagcagaacatctgatggaggacctttcccatgaaaggataaagtgcttgttcaaataattcaacactcaagcactgaaaataaaagaaaaaattaatatgtactatgcctaattctctccaaaggagaagaagaaaatggcttttgtaaagtgagtggaaaaagatgtctttcacaccatgatagtatcaggaggagacttcagcatggccactgatattcttagtgtcacctcttattgtaatgaaattaaggtagcaatgacatggcaatttcttgtcagctttaaaaagaaatggtgtaattgaacttcaccaacttaattgagcccttcccctatatagcttataccacattaagtgggaattcaaggctatttataaagcactgtgactgtcctcaagacactctcagtcaattatatttcataatcacatttgatgcctactgtctattaaaggctccatgtatattttacctgtaaacaggaaatgcttggagagccttaaacaggtacccatccaaattggtatttgagatcattttgataacacaggtaattcaacagctgtctgtaccaattttttaactggatatcttagacactaaaagtggtgtcaaatatttaaaatttaattatctaaaaacatcatttattactttaaatactggtgaaattgtgattaatatacttcactacaagaggaaattaatagtttctaccataataaaattcagaccaatctggggaactttgtaactgaattcccacttcttttactcaacactatacttcaaggtataaattttcttggaatgttttcaaaatattcatcttattgctaagcaataatgctattttctggagataaaaatcagtgcatacttaaaacaactgtgttcacaggaattctgcattttcactggattatcaagaccatgaattaataatattcaacaaaacgtaactgcctagaaaacagatgactgcactgggctaaacagatgatcattagacacctgctccaacacaactattgttaggtattttactctatttgcaaagacagtaaggtgtgtagtaactcaaatctatctgcccacagccaagccaaacaattcattaaagactttcttatgcttcctctatattatgatggtaaaatcttggtaagaaagtcaggtccaattcaaaagagctcaaaggaaaaaaaaaaaattaaagatgctgtcttacattttttgggctgctatgacaaaacaccttagactggttaatctataaacaacagaagtttatttatcacagttctggaagctcagaagtccaagatcaaggcaccagcagatctggggtctgaggaaggcccattccccacagatggcgcttgtcttcacatggtggaagggatgtggggggctagggtgctcccttgaattattttataagggcactaatcccattcacaagggtggagcaccataacccaataagctcccaaatgccccactttttaatactattgcattggagattaagtttcaacataatgaattttggtgggacatcaacagaccatagtagatgcctttaggaggcacacatgtattcccagttcggtttctaactattctagggtagggtccctatgcaatcaattctactccaaactctccaaccaaaatttgaaacagcaatgtcactaagttaaaataaagaaataggttgaatttcaaggtaacaatatctctacagaaataaaagtaaaaaggaaagttaactcttcactttcttagatcattgtatgttggacttacttaaatgtgaggtctctctcaccgtgtgtgtatttgtgcgcatgcgcacacatgtgaaccaatataaagactaaaaggcagagaaataaactacatattagaaactagaaatcagggaaagccaagacaaaccattaagggtggctctatccttgaaataaaaggcagagaaataaaccacatagcagaaagtaaaaatcaggggaagccaagacaaatcattaagggttgccctatcctggaaaaaatgtgcacctcaactgggtcagagcaggaatcgatgaagagcaaagagaagaaacacaaagtggaaaatgacctttagattctagtgccaacaactgatcgagacaattgatctttacaaagttttaagcaactgtgaaagcaaaaatatttagtcttgaggtacgacattagacaatttgtcttagtaacaaagattaggcttatatactgtacatatggtcctttaatttccattccatgcaaatgctggctaagttttcaatgtactattaagtcacattatttttactactttacttcttcactgtggcattattcatcttccacacaaggaagtgaatgtattataactcacaatagagatcattaaaaggctctttcaaatttattttaacatatgtccctcatctctttgagtatatgactatgttctctgcaatagcaataataataataataatttgtctaaataaaccatatatcattcttgtttacttagagtctctttggataaactttttcaatactattagcaattcagatgaccacttcattctcactccaatttctgtataactctttcaaaaactctaaatatgttcatttacatattatttttcttcaagaatctaaatggaactctttaagagcaagaaataaaagttaacatatttatatcaaattttatatgaagagcaaataccctgtattttcaaacatacagttgacctttgaatgtggggggtgagggtcataggagttggggcgctgacctcccatggagtcaaaaatccacgtatatcttttgactcaccaaaaccttaaatactagtagctgactattgacctaagccttactgatgacataaacacttgactaacaccactgctatatgtatgttacgtgtattaaacactatattcttataataaagtaaactagagaaaagttatttaaaaaatcgtaagaaaaaacatatttactattgattaagtggaagtgaatcatcataaagatcttcatcttcattgccttcaaactgagtaggctaaggaggagggggaggaggaagaagaggaaaaggaagaatttgtcttgtcccaaggtagcataggtggaagaaaatccatgtataagtagacctctacagttcaaatccatattgttcaagggtcaagtatatgtgaaaatttatgtaaattaatcattcattttatgagaaagaattttccataaaatccaaaacacagaaatggcatgttagattttctaactagaaattaatgtgtaaaatccaatcacttcaaaaaaagaaacagaaaatgcaatcgaaaacaaaaatgtaataaacacaaatatttgaaaaaaagttgataaaacagataaatcatcaactagtttttgaagatataaaaatacaaatatgaaattaagaatcacttttaactaccacatggaaatttttaacatatattatctttaaatttctgctactaaatttaaaagtagctagaaaattattgaaggtaagtgttaatgtcaatttttttttttttaaataagagacctaactggatcaatcactgcaaaacagctttgctggagtgcagggagcactggggggagtaagtaattgattatttttaaaagctaacagatatataaggtttcccaacatttgaagaatagataatatattttgtaataatttttaaaagaacagattatttgaatgctgtaagaagtactctagaacacaggaaaagatgggaaacttcctcatgtattagttaaaagcaacataccatgatgtcaaatcatcaatatttcaaagaagaaaattgtaagatgtccaaaagcatttgataaaattgtaaatctatacttgattgtaattcttagtaaaataaaaataaaaagacagttctttaacatgataaaatgttagttcaagccaatggaaatttcctacaagaacacaccaacaatgaccacttaagaaatataaagagcaaggggaacattcacaacagcaactactatcaagtatctatagaactgaaattatgaaaaccgatccgtttttactaaaaagcaacatagaagcttttaataaactggcagtatatatcacatttctagagaaacaaaataattaggaaagtcaaatggaagaatgaagtgagaatcatagctaagacttttggggaaaaaaacaggaaaaagtataatattgaaatgatgtgggactaagagaggatagtaaactttagccaatgcttacaagattttcaaatttttcaagaaaatttggaaatctagattttcttaagtgaaatgtcacatgtttctctgtaggcttaagtctttgaaagcactatttccaaagaaagcatttctgtacgctaaattggccagagtggacctctgccctatacacacccaacacttcctgcctcgcccagagctcaagttgcttcctatgttggacagccccgtcctctttctccacccagtcaaatgcaacccacccatcaacgtgtggcttacaggccagtcctcaacagatcattcttagaacctctggtatggctttatcattactctccctctgctacaagaattacagttctaacaatagattgtaataacaaatagtaacccaatgtattctgtctcttcctctagaattgagagtaggaacagtgtctaataacaataccatctactatcttactggcctttctttataccaaacactgaaatgatgctttctacagagtttttctgtaaccctcccaacaaatgcaaaacaggtatttttcctactttacaggtagtacagtgctcagaggggtaagcaactaaacaggtcctggaaataaatggattctaaattcttttttgccaacttcaccaatcatatcacagctggttggtctcggttgagttaaatttacttgggaccctgttctcaaatgagggcactgaggtgagagatacagcaaagataagaacaacattaaacataagaactcaagggtttgtaatctgcaaataggatatgagtactacatgaagcccaagaagacgtgatgtattctagttgtgtatttgaaattgacttcaataatataagttacattggaaggctgaggtgggcggatcacctgaggtcaggagtacgagaccagcctgaccaacatggtgaaaccccgtctccactaaaaatacaaaaattagccaggcatggtggtgggcgcctgtaatcctaactactcaggaggctgaggcaggagaactgcttgaacccaggaggcaggggttgcagtgagccaagatcccaccattgcactccagcctgggcgacagagcaagactatgtctcaaaaaaaaaaaaaaagtaagaataataagaataatataagttatatcaaaaattaaccttttgcattagcaaattttattgattcacttgaacttgatgtactcagtgaaggaaaaacagaacagatggtactgtactgtagcctgaaagaaaatttgaatcataagacaacttttgaaatattcttaatattcttgtcatttaaggtaccaataaagttcttataatacctaatttgtatgttttgttgacatcaaaaatgaatcaccttataagaggcttcttttaaaaaattaaataaatctttaaaatatctataatcaatttaccttcagagaatttaaagtaattctaatgtaacctgctgaaaaattctaaagctacaagcatttggggatgtttcatgagctgtgactgaaaaaggagaacacaacctagtaacaaaactctttcacaagataatctgaaaagtccaattaatcattcaccctaaagaacacatttttgtttaagtgtctttaaaaattcaatagaacatctcacattgaaaaacatttgtgccaatggggaaaaaaggtcttttaaaagtactatgagttactaaaccagaaatgtattattttaaagaagttaaagaaatcctcaagatgatgttttcctctttatttttagacctgtgaaagatatgtttttaaaagttccacttataaaaaaggcaaatatattacagaaaactagatcattttttggctatttctaaatttgttcagtatttgtttaaggctagaaagtcataagcttcaaccaatcatattttggctcagattttaagttattcatatttaatatctgttctttatagcaaaaatacatgactcttctgcaaaaagaaaaaaggaacacccaacttattaccatagaacaggggtcagtggacaatgacctatggaccaaacagagccatggcctgtttttgaaaggcatgctcccaaagaatagtttttacatttttaaagggctgttaaataaacgtttatgtgtgtgtgtgcatctgtgtgtgtgtgtgtgtgtatgatatgtatgcatgacagtgaccttatgtggctagaaaagcctaaaatattactgtctggcccttacgcaagtttactgaccctgtcagaatataaaaagttctttatacaggcatgccttattttgttacattccattttactgcactttgcagatattgtctgtgtgtgtgtgtgtgtgtgtgtgtgtgtgttttgttttgatttgtttttttacaaattaaaagtttttggcaatgttgagtcgagcatgtctgttagtgccatttttccaacagcatgtgtcacattttggtaattcttgcaatgtttcagacttttctattattgcatctgtattggtgacctgtgatctttgatgttactattgggactggcttcggggcaacacaaaccctgaccttctaagacagtgaacttgataaatagatgttgtgtgtgttcttactgctccaccaactggcaattccttcatctctctcccggagacttaacaacactaaaattgggccaattaataaacctcaaaggcctctaagtgttcaagtaaaagaaagcatcacctgtctcttactttaaatcaacactagaaatgagtaagtttaatgagggaggcaggatgaaagcagacagaccgaaagccaggcctcttgtgccaaagagccaagttgtgaatgccaagcaaaagttccagaagaaaattgaaagtgttactccatcaaaaacatgaataagaaaacgaaacagctttaatgctaatgacggagaaaatctgagtggtctggatagaagctcaaaccagccacaacattcccttaaaccaaagcctaatccaggtcaagctcctaactctctttaattttgcaaagaccaagggaggtgagaaagttgcgttggaagccggaagagtttggttcatgaggtttaagaaaagaagccatctgcataacataaaggtagaaggtgaggcagcaaatgctgatggggaagctgcaacaagttatccggaagatctagctaaaatcactgatgaaggtgaatatactaaaaaacaaaaacaaacaaacagattttcaatgtagacaaaacagcaacctatcgcaagaagacgccatggaggactttcatatagttagagaggagaagtcaatgactggctttacaatctcaaagcacaggctgactgttagggaataatgtatctggtgactttaaattgaagccaatgctcactcactattctgaaaaattatgctaaatctaccctgcctgtgctttataaatggaacaacaaagcctggataatggcacatctacttacagcatggtttattaaatacttcaaacttactattgagatgtactgctcagaaaagattcctttcaaaatattactgctcgttgacaatgcacctagtcacccaagagctctgacacagacgtatgtagaactagattaaagctgttttcatgcctaacacaacatcctttctgcagcccaaggatcaaggagttacctcaactttccttattatttaagaaacacgttatgtaaagatatacttgccatagatagtggctcctctgatggatctgggcaaagtaaattgaaaaccttctggaactgattcatcattctagatgtcctaagaatatttgtgatttatgcaaggaggtcaaaatatcaacattagaaggagtttagaagaagctgattccaaccctcacggatgacttggagaagttcaagagttcagtggaataagtaactgaagatgtggtagaaacagcaagagaaatagaattagaagtagagcctgaaaatgtgacttaattgctgcaatctcacaataaaactttcatggatgaggagttgcttcttacaaacaaagtaagtggtttcttgagttggaatctactcctggtgaagatgctgtgaacactgatgaactgccatggccaccccaaccttcagaaccaccaccccgatcagtcagcagccatcaacatccaagcaagaccctccaccagcaaaaagattatgactcatttaaagttcaaaagaatgttagcattttttagcaatgaagtattattaatttaaggcatgtaggttttttttcatcacaatgctattttgtgcttaataggtcattataatgtaaacataactattatgctttggggaaataaacaaaattctagtgacttgctttattgagatatttgctttattgtagtggtctagaaccaaacctacagtatctctgaggtatgcctataattaaggtcttatatgtgggtcactgacatcatactacactctaagctgccaaagagattgagtcagaagattaatggatgaagtatgaatgaaaggcaatttttaaaatatctttaataatatttacagcagagacacactattaaaatctgagatatggcagcatcaagttgtcaacgtgggttccagaaattgatctaccctcaatacttgaaaatactgaagttttagatgggtgttcatctcacagatggggtttaaaggagcataacgtgctatttcatacacatgtccccctccctctaatcctccactccctttttgccagaaatagtcttacacgtcattcaaacacagaagaaatgcttctttctcaatgaatactctaaatcatggggccccaacccccggggccatggaccagtacctgtgaactgtgcatgagaaggatctaggttgcatgttccttatgagaatctaatgcctgacgatctaaggtagaaaccattcccactctttcccagtctgtgggaaaattgccttccatgaaaccagccctggtgccaaaagggtttggggaccactgttctaaatcctccaaattaacaaagttagttatccccttcaaagctttcagaactttctgtacaattattttttatagaacttgtaatactgtattatatttttgtttacttttcaaagatttttgaattcctggtagcaaagaccttataaccactaacatttcacataatacattgcccatagtgagctgattaatttcctgtggctgccctaacaattttccacaaacctgatgactaacaacagaaattattctctcacagttgtagagaaggggaaaagcaaggccataactccttcaaaggctctagaaaagaatcttttccaccgggcatggtggttcactcctgtaatcccagcactttgggaggctgaagcaggtggatcacctgaagtcaggagttcgagaccagcctggtcaacagggtgaaaccctgtctctactaaaaatacaaaaattagccaggcgtgatggcaggtacctataatcccagctattcgggaggctgaggaaggagaatcacttgaacctgggggacagaggttgcagtgagtcaagatcatgccactgtactccagcctgggcgacagagtaaaactctgacaaaaaaaaaaaaaaaaaatcttttccttgcctcttgcaacctctggtggctgctggcactagttggtattccttggcttgtagccacatccttacaacccctgcctctgtattcttattgccttctcctcctctgacgcttgtaaggacacttgtcactgaatttagagcttacctgagaaatccaggatgttctcatctcacatctttaacataattacacgtgcaaaaaccaccttccaaacaaggcaatattcacatattcccaggattcacacgtgggtatatcttactgagatttaccattccacactctatcgctgccatacagtaaacatgtgctcagttttcttaccttacacccacatgaaataaacttatagataaacccaaaaatgaggaaaagtggaaacaggaaaacttaatttcttcccttctctgctaatatcctctttgaaaaggaaccactgaggcatagccagaaagcttcaccagcattttttttactaagaaattactaaggattacttaacacaatgcccaatgacagatcactggagaccatttctttgctcctagggaaaaaaggccagagatatattttcttcctcacaaagaaacactcttattcacatcgagtgggaacctgctttaagtgaagtttcaatttctttaaattctttatacgtggccatgaacattttacagcacgtgtagttttacatgaatggtagaaagccaaactactaagaatttatccttacaggaaatttaagtgtttaaagccttacctctcaagattttaggctttcatttgaaacacaatcccttgcacatcatgaacattcactgagaataagttgattcccatggctatgattgtttcctagacacagtttaagatgtcatagcagaacttttcagaaagtattttaatcttacaaagatcaaagactgctatgatcttcaaattagggttggaaactaggatagaaatttcaaaacttctataaactataattaggcctgaaataattgttctattcaaggtttacattattaactgaagggaccaattaactattaatatagtactatctagcagattataaaataatgctggcaatataatgtatccatagactcaaactcttcaaataaaacatccctaatatcccaccataccagggaaccaagataatgaaaagttagccaagagcaaacgtaagaaaaatgtcaatcaacttgctgcaagatttggtaaaaaatctattttctctactcttatcgcaacataagttatgaaaattccagtcaattagccaaaataatgtaataatttcaaacagaattattggtatttcctctatttatcagtttattaaaaaaataaggtttaaagaaagactgattctgatcaacttgattcacaattagaacagcatctaccctggtagcaaaaagaacactcagcacccagtccatggtttctagatatcattctacaatgaaatgagagacccttgaaggattggctgatttggtagctgtggcagggaaaatatgagatgagcctggagtatcctgtaataccagaaagttaacaaagtattcaaaaacaaaaggacaaggggatgtcactgggccacaagagcaaatctgaaagtggtctttggtcaaaaccagaaaaatctaaataagagactaacacagtattagcttatgactccacatgtaagatatatacgcatgtacccatgccaatataaatttaaaaataaatgggggagaacaaaataatctatagaattctaaacatgatatgtagttattccttaagagtaggcaagacttagtgactcacttccacagaacagagtaaggaaatggaaaaaaattacagtagagaagcttggcaaataccactttaaccaagtaattaaggttaagatcatcagtggtatcttgtggatatcatgatatgatacaatgataccccgatgtgatacactgagaagggttcgtcacctatgtgatattgttttccaataccccctaagccagtctaaccatgagaaaagcatcagatgaaccaaaactgaaggacgtcctataaaatacctgaccagtactccttaaaattcttaaggtcatgaaataaaaagagagactaagaaactgccacaaaacagaaaacttaacaggtgtaacaactcaaagcaatatggtacttgtttgtatcctaaaagagaaagtagacattaatggaaaagccagtgagatccaaacaacaataacctaccaatgttggtttcctggtcttgataaacaacgccatggtaattctactaagtgtcattacacattgttagtttttgtatgtgtgtgtatgtgctttttgaagtccttatctgctagacaaatatattaaagtatttatgggtaaaattatatgtctgaaattagttgttcagggtgagtgaggccagagatttatgaaacaagatggcaaaatgttgagaattgttaaggttaagtctgggtgcatgagggtttcttatactattctcactacttttgtatatgtttaaaatttctcataataaaagagatatttcaaaatcttttaaatgtctatgatttagtcaaccttctttaaataaaagccacacgtctcacaatgcttaatgaactttgcaaagtttgttacattgttaaataaaattcttacgcatcaaaaacacaaaaaactttttaagtgctttattagttatgttgtaaaggaaatctggtttcctctgaatggtgtgactttccatacattatgttaatctatttcctggtagataagagaatgaaggacaaagtggctgactcagttgcaaaggctggtaggtggaggcaatgaaagagaaatgcactctcacattacatttattaaattatggtcaaaaagtttcaaaactgatacgaaaatggaattaaaccagtccctgtgatatattatcacccccgccaaaacccaatttacaaatcaacctttccaacatcttaattgtaagagggtgcaagtctgttaagataggaagctgcacatgctcatgtgcacacacaaacacagacctcttcccaagaacaaagactacaaagagaaaaaataatgaaagaaaagatgtagtacttgaaagatccaggagaccaaacacgtgaagagaaaactaaaggagaaaaagaaacaaataaaaggaagacaataataatacatcaacttcttaccataataattatttatctcagtatctactgttctcttatatataatggcaggaagtcaatcaaaaattacaagggcagggcacaatggctcatgtctgtaaacccagtaacttgggaggccaaggcaggcagatcacctgaggccaagtgttcaagacccacctggccaacatggcaaaaccccatttttactaaaaatacaaaaattatccaggtgtggtggcacgtgcctgtaatcccagatacttgggaggctgaggcagagaatcacttgaacttgggaggcggaggctgcagtgagccaagatcacaccactgcactccagcctgggtgacacagcgagactcttatcgcaaaaaaaaaaaaagacaagacagaaaaacaaagcaagaaactacccactgtcaacagataaacctgtcaacacaagcagaccctgagatagcagagatactgaaactaacaaattgagagttgcaaaataaatataagatgtaaaagaatctagaggaaagggtagaacatgcatgaacagagaaattaagcaaaggggtcataaaaaatgctaggcaaataacttctatgaaaaattaagaattctttcactgagctaacaacagacctgacacagcaggaagaattaggaaacttgaggacagatcaatacaaattattcagactaaaacttgaatagatgggggagaggtgcagaagattcaagacttgtggggcaataccaagtagtctaatgcgcttgtcaacatagtccaaagggaaaagagaagagaagggagggagagcaatagaaacactgaaaaggtaatgggtagaaatttctgaaaaactaagaaaaacaataaagcagcttagagaatccaacacatgataattataaatgataacacacctatatgcatcatagtaaaactgctgaaaaccaaagttaaagaaaaaactcctgaaggcagccaaagaaaagaaaaaaaagaaacattacatatagacaaaaaaaaaaagaatttcaaaagatatcttttcagaagtatataaatgagaggatactggagcaatatctttaacgtaatggtggaaaactgtcaacccagaattgaatacccacctaaaacacttcagaaaccaaagcatatagatacctttacacaagcaagagctgagaaatgtcattcccagcagattgcactgcaagaaattatttaagtaggccaggcacagtggctcatgcctgtaatcccagcactttgggaggccaaggtgggcggatcacctgaggtccggagttcaagaccagccaggccaacatggcgaaaccctgtctctactaaaaatacaaaaattagctaggcgtggtggcaggcgcctatcaggagctactcaggagcgtgagccatgagaattgtttgaactcaggagacagaggttgcagtgagctgaggctgcgtcactgcactccagcctgggtggcagagcgagactgtctcaaaaaaataaaaaataaaaaattattatttaggtaaagaaagaatttatttaggtaaaattaatatgatactatataaaaacatatctacataaagaaataaaaaaaaccctggaactagcaaaaatatgagcaagaattttaaaacatatttttgtctgatattgaatctgtattaaaggtaacttattatttaaagcaaacacagtagccaggatggataggctataacatgtataagtaaaatatatgaagaaaatagcacaaacaatgaaagagaaaaaaatggcaatatactaagattctgctatcatacagtaaggtaaagtattacctgaaggtaggctgtgagaagttaatgatgtatattagagtcactactaaaaatacaaaacaaacagattaactaataagccaataaagaagattatataaaatactaaaaaataatcaagcccaaatagagcaagatacaggtgactatgagggaacaaaagagaaaaatagaaaacaaatagcaagttccagaaacccaattatacaaaaagtattttacattaaattgccaaaacactccaaataaaagttagagatggtaagaacagaggtcaattcactaagaaaacacaacaatcctgatgtgcacacacctaataacagagtttcaaaatacataaagcaaaaactgacagcactgaaaagagaattacagaaattcacaactgtacttcaatactttcccaataactgacagaataaggagtcaaaaaatcagtaacaatatagaacaatatagaattctccagtaaattctcccatacttttatggaagaaatagtaccaattctacacaaagtattccaaaaaatagaagagaatgaaaaacttcccaactcattatacgacgttatgaataccctgaaaccagtatcagatgaatacattaaaagaaaagaaaaaagctaatgaccattatcccattaaacaaaacaaaacaaacaagcaaacaaaaacactcttaaaaatcaaatccagctatgcataagatcaaagcttatgtaagcaatgcatatttttgaaatataaaaaataaaacacgagcaaatgaaaaacatctacattcttgaattgagataatataatgcattgcaaataacattaaaatgttaattatcccaagaatatatataatttaatgcaatcccaattaaaatcacaacagggtttttgaatttttttatcccaggagaggtgtgatgatggataaaatattcctcacatatgaatgctagttgcaagtattagaatacctaagaaaatttataaagaaatccaggtactactggatatatgaaaacattacatgacaaatgtgaaatttatattctctggaaaaagaaaaagactacctcaaaattgctgctgatacaatggtatgtctatgctctgaaattaaaaagtagactccctctcttataccatatacaacaataaattccaaatagattaaagacaaaaatgggggggaaaattaaatctagtgaggagattacatgcctactttatcaatggagaaaaccttaaaacaggacaccagagagaaagagaaggaattgcttatatattttaaaggttgtattcaaaagatacttcttgaacaggcaagagataaaagatcagcttatgaaaaaaattacttgcaatggagatgtcaggcagatggttagtggctttaatataaaatgaattcccacaaaaggacaataaccaatttttttaaatgggcaaagaatatgaaaggacaattcttagaataattctaattttcctacaaacatcacaaaagatgttcaaagtcactaacaatcagaaaatactaattccagtaacagtaagatattaccacacaattatcagactgggaaacatgaactattactgatggtgattggggagagcgtatttgcctgcattgctggtaataatatgaattactatatccttgtcaaagcaatgtggcaacatttatgaaaattgatacatcttgaatggatggtcctatccctgggaatctattctttaggtctctcagaagatacccataaagttatttattacatcattagtttaaaagcgacaaaaactggaaacacagtatttccctctaataaatgagtgagtagactatgaaataaccactccttggaatacaatataacaaatttttaattgattagaacagtagcagctgagaaggatttctcttaggcagcactgaacaaaaaaagataaaagagtttcaaaaaaactccttccatttttgtaagcagtgactaaaaactgtgtatgtgttcctaacgcttaagaacatggataaaaatataaaaggacacataatcgtgctaaaaacataagttatggactaatggaatgctagttttggctagaagaaaaagaactaagtaaaagacaaaacaggtcactaaaaaaaaaaaaaaaaaaagaatgaatttaaaagtttccatacaagtatacccacttttatcagaataatatatttgtaaacaatgcccattaaagcgagcttttgcaaaacaatgcttattttctaacgatcttcagttgtgtttctttgaaaacttaaagagtcacagaaataaaaagataaaaataaatcacacgtcaatatcataaatacctatctgtgtgttggttggaaacataaaatgaaatgcgtttaaaatgtattatacacatttaagattaaaaaaatgtgcaaaaagtttttgaaagaaaaaacttacgaaactacatacctaaataggaaaagtttttctagtaagattaaaagtactccaaagagactacggcataaatctaaaaatatccagggtaccttctaggcacattaaagatctaaaagaaataaactaatccagaatctatcagcttgggcttgcctttcggcttagctatcctgcttctttcttgatctgcctacattgtaggacaaagcccatgttttatctacgtatgtatttacagcacctagcacaagccttggcacatggtaaatgccctaactttcttcaaagagtatggatgtctctaactgcacactctctattccagggtcaacgggttgatctctctgggctgttacatatggattctttctacctttttaaagtgcattttggaagaaggtaaaaattcatctgatattcactgggcatttcatatgagctagacactagtgacacttcttttatgtaatgtggacttgcaaagtttttacttatcgagactaaatgaaagtcagaaagacagtagtaattatgcaatgggaaaaaactattttactggtgttggcaattagggttctagttctgccaatttctagacttttaccttctcctgattttagtgttctcatcagttacatgggtaacatgtgttcaatccaccatacagaactatcaagatgaaactaaatccactctaaaccaccaggcacaaagcaatttttgttgttgttgttgttagcccatacttatcaagtattctaaactgtcttaattactgttatttataaacaaaacacaaggtaacggcctcagcctaaagccttggtataattccaccacactcaatatagtgctaaaaaaaaattccattaatgcttttaatcgactcattgagttcatttctttcttcaatgaaatattttgtgtttgctaaagttacttgtattcatatctaaagcagaagagctaatgcatattccaaagtctgttagccttgaaatatccacctacttcaagcttctaaatatcccttcaagcaacacttctgataaactgcaactatgatcttctgcaaaatttatgttttcaagtttttccttccattgttctcacgttttacaaaattgtattcctcttaatatttaaataatattttaatacaaactaaatattcccattatttaaaagatttttttgtcaaagttaaaattccgatcatttaaaagtaaaatactacacattttttcaaaaatatggaagaccttcattagacagcatcacataaagtgcatttaaagttgtattcatcagtcaactttctttgcttttgtagcccaaataaaccatctgtaaactcattataacaccatataccctattggccaagcatatcctagaatctatttttggaaaagaaaacttcctggtgatacggcaaatgataaaaatttgccaaaacaccataaaaccatcagctctaaaagataacagaaaaaaataagagggaaatcaccacagctgccaaaatatgtttttaatttgcattcatccattagcaggtttgctttttctattaaaaaatataaactgggccgcgtatgttggcccacacctgtaaccccagcagcaaggcgggtggatcacttgaggtcaggagttggagaccagcctggccaccatggtgaaacccgtctctactaaaagcacaaaaaatcagctggtcatggtggcacacacctgagtcccacctactcggaaggctgaagcaggagaattgcttgaacccaagaggcagaggttgcagtgagctgagatggtgtcactgcactccggcctgagcaacagagcaagactccgtttcaaaaaaaaaaatatatatatatacacacacacacacacacacacagtttatatttaaaaaacacactgtttatataaaaagatacacatacacactgtttatataacgaatcttttccatatatctactaaaaccctgaaacctcaatttcccagatagaaacaatttttccccaggtgctttaaacaacttacagcacttggtccatttatcacaaattaccttacattataatgtgccacataattcttaccccaccctccttgattttcagctcactaacgatactggatattgtgctacccattttcatataagggtctatagatgtagtaggagctaaatacgtgtaagtcaaacggataactgaggcatgttctaataaaaataacgttattattatttgtattatgtccctaactttgatagctttatccaatagcagaatgcatattagccagaatttattggtctactattaccactgctgcagaacatcctatagcagtttacttctaaaataattttttggataaggtatcataatttgttttactacatatatcagcaaacaattgacttctttattgaagtatatcttgtagtaaacgtattctagtaaacacagtatgtcaatatgatctacaacaaatataataatacagcctctaaaccatatttatttgtataatccttccacttttgctttattctacagtaaggctaactctggaatattacgtttaatgatagagggaggtaggagtaacacaaggggaaagtccagggggctttctagcgttcagctctctacagctaactggctattcactataatttcattactttactttgctgaaaatcaatttccacatctatgaaataaaaatcataatacagttcataagagtccaacaataaaacagaaagcataacatagtgcatatagcacatatgtgctgtattacatgtcatataacatatactatacatgacatataagttgtacgattcaaatatatattaaatgatacaaatacatatgatacataggctatgaggattactatacctatattatacaaatatcattgaatatttatttaataaaggatggaatctaataattgtatgagattttgtacgttttctcctgaaagcatacaaaactcaaatatgcagaagtgaagggaccagacatgttttaaaggagactcattctcacagacaaaaggaaaatcacaaaatctgccattatatacaatctattagtcattaaaagtatttgtattttttgtgttctatttcatttttttcacaatttttttcacaattcatcagcttaactccatgcagcacttccaataaagattcatcactttcagcacatctaatgattattgtctcaattttatatcaagataataaactttctcataactagatgctttcatttcccctttttccacttgttttgttaaaataaggtaaaaagcaataaaattttccaaataatttttgaaatttttgccaaaagtggcaaagtcacagttctgtagcaggtgggggttacttggcaagacagcaacacaaacagcccaaaaaaggcattcatcaaatgatgttcgtaagtcaaaatccagtatataaatggcatttcagaggtgacacgtatagtattccatgtgccagttatttgaaaagtcaatgatataaaagccaagggctaccagtacctgtttactaaagagtacatattaaacacactaacatatgaaaaaccaagttcttaacttctgtattatactaggtatacaataaggagtattttattttgtacctactatttactctgaatggctgtttgttgttactgttgttttagagacagggttttcaaggctggagtgcattggctcaattgatcatagctcgttgtagccctgaactctgggatcaagggatcctcctgcctcagcctcccaagtaactgggaatacaggcacacgccaccaaacccggcctgaatggcagcttttaagagagccatcaatacactagagcaaatatttataaatgcagcatggtttaattctactatactacaagatttctttttgcaagaagacataaaaaattttttcagggaaataaagtgaatcgaggaatggttgacagcgttgaatatatttagctacttagggtggaaaagaccatgataggggcatttagaacaaggcaaatcaacaagcaattaacaccagaaggaatactatgagttgtggggcccgagaataccaaccggaacacagtgtattcttaaagcaggggatgataaataagagagtcccacaaaaagtgatgctgatgtttgcagtgataattgtaacatgaattggagtcaggcaagatacctgtaacatggaaagagtctaaatcagttatattgaagagatagtttgagtttgtttctttgctcttgcaagggtttaaaaaaattgtttttgtttcttttttaactggagaaaatgcagttgcggagaaatcatgcgtgattataaataggtattcaataaatgtacaaataacgtgtaagatcctcattatctacctttattgtgcattttgtataatgttagttaagaataacatatagcatgttgcaacaatgtttgagtctaaccaagtgacttttaagccataaatcagacatagcttaatcaacacaatcttgatttaactggggatttgcagttcaatgtactgcttgaaattatagtatatcacaaatttaataattctatttttaaaattaagggcattctttttaatgaccagttgatagaagcttcaggtgactcattaaagaagtagcctgcagattttcaatctctaatcattgttcatctttattttcaattttctgtaaatgatcatgtgaactgtaatttcatgtgtttttcttttgacaagcttggatacttcacctgtattatataaatgttaataatcagtaacttttataccagctacgttgaaactttttaagagtgactttctcaaggtcacagagcaaatctctggtgagacaggaatggaattcatgacctttgactgccagagttttctacccacactcggaaattccttccccataagtgtaatttatatgctcactttgagaaacaggaaagtttatccctttcaggggagggcagtgtgggggcggtggaggtatggctggagtgcttttcctatcaaatcagttgccacacaagaactttgtagttttacaaagtgacttttggccacattaccccatttaaccctcaccacagccctgtaaactacatattattttttccattgtataaactcagagaggttaagaaatttgaccaaggtcatccatagttagcaagcaagagagtaagaatcgaactgagatatttctgccactgaaattagttgtgattcaaggatgtatcatcttagaggttaccattcattgtgaaatgaaggaaggttttctttacattgttttcgaataatttaacttggttgccatttaggtttgttttctttaaggcagggttgtttttcttttgttacaagttagctcgataatttcaaagtgagcacagtattactaaagatagaattttttttaaagactgtttttcccccttttttatacacacgtgtggctttttactgtatttctcggtcatgaaattttactgtaattcttgctcttgtgtatggtgtgtgtgggtgggttatgtactaatatagatatagactacaaaaacacatgtaaaaacatataaagataaatactaaatatacacatacacatatagatatataagatgatgaatatatatgtatatacagtatgtagtcattcttcagtacccttggagggttgactccaggatcccatcccacagcagataccaaaatccatggatgctcaagtccgttataaaaaataatgcagtatttgcatataacctgtgcacatcctcctacatactttaaatcatctctagattacttacaatcacttatacaatgtaaatgctatataaagttatgattttatttgtatcatttttattgttgtatttttttcttgaacgttttcaatctacaattgattgactcccttaatgcagaacccacgaataaagagggccaactgtatacatatacatcatgccaggaattactgtgaaaggccatatatactgagaagcatggcaaatgtcacacttgggacacaattcatggctgtcaaagccagcaggtagttatcgtggtagcttctacagtcactgatagtggtggggaaactatcccaaaggtctcctaatttattccactctcaccttccatgcagcagtacagcagtaagggcttcctgctacttctgcaccagacagcaaatgtgtttggagcagtctaattattacactaataaatattcaaaaatgtagaccatgagagtagcaacaaaagaaacacatgactttaagttgaaaaaaaaaaaaagacaggaagaaagaccataccagagcagaattctttgggtgaatatcctgtaatctactgccgaccaaaacaaatttttatggagcaataagactactcaagtagccactttatgacaataaacacccaaaacggaaaaatccttttgtaacataattactgacaatatagagagaaagtaaccatttaatccacagcatgtgttctctaccacaagaactcaatagctgacatcagatggggtgtggccgacctaggccctaaaaatgaattctggcgggtggaagtcaggcagctctctgggctgggcttgggatccagaaacttagcaggtctaacagagcctaagactgttgaccttctgggcatagggcaaggcccatctgtttacttgcttgcttttgggaggagtggttgtggtagatgagttaaggctgtggttatagggcgttgccagtgatttaattttaatatttttacccttacattctgtacacagttaaaagttcaaagctgtgcataaattgcaggccgaaaaacaagtaagtgtgagtttgaaaggaaaaataaacactgggcaaaaatataagccatttccagtctatgatcatacagtattttcaaatagaaaatgacagataagcaactacaacctatttcagacttattttaaaaattaaacttgtagccagcgcagtcgctgatgcctataatcccagcactttggcaggaggtttgcttgaggccaggaattcaggatctagcctggacaacacagttaagaccccgtgtctacaaaaaaatttttagctgggtgtggcagtgtgcacctgtagtcctgcctacttgggaggctaaggtgggaggatcccttgagcccgggaatttgagctatgatgatgccactgcagtcccgcctgggtgacagagtgagacctcaactcaaaaaaaaaaaaaaagctgttttctaagcagaaaaggtaataatggtgttgattttgaataaaactgtcttgggattttagctcatgttcattaatcagcatgcaagtggcaagcagaaaaacttataaacaaaaacttttcaaatgagtttgtgccattactagttttatagtttaatacacaatctacagctagatttatgaacttgactgcttctctcacaatataaagaaaacaaaccatttgacactccaatttaatgtgatcattgtaatattattaatttgcaaaaacataaagtcccatgctttccatgttgtacaatggaaaaaatgtccaggacctctatatgttcatctacttaacaatatgccttcactgggtaaggttaccccaaactctagattaaccaacactggcttgaattcaaaatgctctcagcataggcctagaggcctaagcacttacgttgtctctgcagagataaaacacacctatatttaaggccaaattatttcagtaagttgataacagcctgtttcatgatatactgtaacatctaaaactcactggagcctgttaaagtgcatactttccctgaacaggagtcagggaaaatatccctgagcaacatgtatattttcacatgaccagaacacgatggatattacaggccagatgcatgttcttcagaatgaacgtcaagcatcccgatttgttctccctttggcctggggagagtgagtacactagtgtttgcagaccttccctttcagcacacacataggctgcagctgtagtaaacaaccaccagccaagagttgctaaggtcaaggtctcaaatgctataccaggaccatttactcccaaatgatagtcattgctgtaaaaagaacttctggggagtgggaggtggagaatattaaggactcattagcacaacaatttttttcaataaacagtaataaaaagcattccacaataaagttcagctgactgcattgctaagtagtagataaataactgaaggttttcaaaaataaacagaaaccctcaagaatgttttgtttaacctgacatagccatgttggttacatggtcttagttcaaaattatgaaaattttatgtgaaaacatttcaaatttcaaattttcccagtacatttcataatagttattaaattggcagaataataaactgctttcctaatttttatatgctcaaattgctctttccccaactcaaaggagcttaatatattcaatctagtatcaagacccgtctgcaacaataaagatataacttacccaactgaaacgtctgtccttcaacatcctatttccactatgcttctacagtttgaaattttctaacctaaaagtatactcctttatcggaaccaatttctatgtggtcttaaaaaatgcacacaacatgtgaatgaggtctgagaatagcacaagcaagcttttttccttgagggagggggggtccactgttttaaataaatgtcagttctaaaagcgtttcttagaagacggtatacacccactcctcaaagtgaccactcctattcccatcacaagctgcttcttgctaaaagccaccaaatttatttcaaagcatttacttatctaaacaactctatcgtccagtaagaaaagggcatggaggcgtctaggtggttttgcagaatgacgtgtatttgattggcagatgtctaccgaagtcactagatgcacacgcactaaatgtaaatagagttgctcgtctctccgatgttacagggaaacagagaatcttaacgctggtgtaaaataaaatatcagagtgctcgccgagaattccattagccagtggaattatctaaaacaatccatacagaacgacactttagccatctatacagttaaattagagtgctgacaatactaactacgcaaactgtttatccagattacacattccgttgtattaatactctttaactcaacacagtcagcttttatcagctgaaataagactattactattaaagtatgcaaaactcgaagcgcagggtgaagggggttgggaagctgcagggcatataacaaaggaattggtactttttccaagcatttgcctcaaatgcactgcgaaacaaaactgttgagtgcaccccacccttttccccaaagataaaagttttcaaagttcttgcagacagctcgctacccaacaaaagcaggactgattctccccgtaggggagcatctaacgtgaacaccaactaatgtcgcggaggtcaagtctgaaccctcagagtgagcttctgaggcaagaagtggctcccaggccggctctgcgggttcccggcccgggtggacgtacaaagttgccccttgtcaactccggccaggtcccccgtaattgaaaataacagccaccggccagcccctggctacttgcatggaccaggcactgtagcaagtgacagttacacatcattacgaccagagacaataatgaatgtagcaccaggagcactattcatgccagcagtgtcatctccgccttaaccccttcccctccactctctccagcgcgcacacacagcccacacggtcccggtgcggagctattcatccaccccgctcgaggccggggggccaactacttccacgagccccccctcccccccaagttcagccctggggttttatttcacatccttggcaactgtcaggcaaacactgcaaccaacaattccactaggggtagaaaaacacttgcttaattcacgttacttgataacttcttctggaaaaaaaaaattaggggaggtggggaagaaacctccttctttcttctccacgaatccgaccgacgctacttgctttgcaacagcatcgcccttccccggccccctcccgcttcccagcactttccccctttaagaacacagaccaaccaaaatgatttaacttgagcagatgacagaaggaaaataaaacacgttaagagaatacggtctgatttgggatggcaaaaaaaaaaaaaaaagaggagggggttgtttattttgataagaaacggaatcggcacagacctgaacagaagctgcagagcaggagaaattgttttctttccctcacacagagtccccctctctctctccctttctctctctcacacgcgcgcgcgcacacacacacacacactcgcacacacacggcgtcacccgcgcacacgcacacgcagagcctctcagcggct

SEQ ID NO: 2 - DNA, 1920 bp, Homo sapiens
agccgctgagaggctctgcgtgtgcgtgtgcgcgggtgacgccgtgtgtgtgcgagtgtgtgtgtgtgtgtgcgcgcgcgcgtgtgagagagagaaagggagagagagagggggactctgtgtgagggaaagaaaacaatttctcctgctctgcagcttctgttcaggatcaatgtgactctaagaacaaatggatgaatgaatatccatatgaagagaaaaacaataaagaatatcaacacctttgagaacagaatgttaatgcttgatgggatgccggcagtcagagtcaaaacagagcttttggaatctgaacaagggtctccaaacgtccacaactatcccgatatggaagccgttcccctgttgctaaataatgtgaaaggggagcccccggaggactcgttatctgtagatcacttccaaacacaaactgagccagtggacttgtcaataaacaaagccaggacgtcccctactgccgtttcatcctccccagtttccatgacagcatctgcctcctcaccttcttcaacttcaacctcttcatcgtcttctagtcgtctagcctcatccccaactgttatcacatcagtatcttcagcgtcatcttcgtcaacagtattaactccagggccccttgtggcctctgcatctggtgttggaggccagcagtttttgcacattatccatcccgtaccgccttcaagtcccatgaatttacagtctaacaaactgagtcatgttcaccgcatccccgtggtggtacagtcggtgcctgttgtctacacagctgtaaggtcacctggaaatgtgaacaacactattgtcgtgccgcttttggaggatgggagaggccatggcaaagcacaaatggacccccgaggcctatctcccagacaaagtaaaagtgacagtgatgatgatgacctgccaaatgtgaccttagatagcgttaatgaaactggatctacggccctttccatagccagagcagtacaagaggtacatccgtccccagtatcaagggtccggggcaatcgaatgaataatcaaaagtttccttgttcaatttcaccatttagtattgagagcacaagacgccagagacggtctgaatccccagactccagaaaacggcgtatccacagatgtgattttgagggatgcaacaaagtgtacacaaaaagttctcacctgaaggctcaccggaggacacatacaggagagaaaccttacaagtgtacctgggaaggctgcacctggaagttcgctcgttcagatgaactgacgaggcattaccgcaaacatacgggagtgaagccattcaagtgcgcggactgtgatcgcagcttttcccggtcagatcatttggccctgcaccgccggaggcatatgttggtgtgaggaatgctacctgtccagctgagcgtaagagctggatctcttagcggcacccaattcagcagggctgaatccccttcacagtgttaacacaaaagggcatcaccatcccacgatgtctgaaaccagagcaggaaaaagaaggcacacttcttttggtctgaaggtaacccccatcatgactagacgagaaccgtctttacccggcctgggagctcagtgacataaatgctgaagagacaggcattgttttccgtgctgtgtcctctgccatttaaagatgtttgtagcttgtacattttctgagctgtcagacattttgttattgataccttaaaggtcacctaccacaaattgatggctagagcaagaccttttaaatttggatgaatctcccatcatcccatcccttaacccctttttacagaaattttagttacaatctgagtaagctagaacacacatccaatctgttaccagcaagcagcatgaaagtagaaacgaagaagcagatgg

SEQ ID NO: 3 - DNA, 1597 bp, Homo sapiens
agccgctgagaggctctgcgtgtgcgtgtgcgcgggtgacgccgtgtgtgtgcgagtgtgtgtgtgtgtgtgcgcgcgcgcgtgtgagagagagaaagggagagagagagggggactctgtgtgagggaaagaaaacaatttctcctgctctgcagcttctgttcaggatcaatgtgactctaagaacaaatggatgaatgaatatccatatgaagagaaaaacaataaagaatatcaacacctttgagaacagaatgttaatgcttgatgggatgccggcagtcagagtcaaaacagagcttttggaatctgaacaagggtctccaaacgtccacaactatcccgatatggaagccgttcccctgttgctaaataatgtgaaaggggagcccccggaggactcgttatctgtagatcacttccaaacacaaactgagccagtggacttgtcaataaacaaagccaggacgtcccctactgccgtttcatcctccccagtttccatgacagcatctgcctcctcaccttcttcaacttcaacctcttcatcgtcttctagtcgtctagcctcatccccaactgttatcacatcagtatcttcagcgtcatcttcgtcaacagtattaactccagggccccttgtggcctctgcatctggtgttggaggccagcagtttttgcacattatccatcccgtaccgccttcaagtcccatgaatttacagtctaacaaactgagtcatgttcaccgcatccccgtggtggtacagtcggtgcctgttgtctacacagctgtaaggtcacctggaaatgtgaacaacactattgtcgtgccgcttttggaggatgggagaggccatggcaaagcacaaatggacccccgaggcctatctcccagacaaagtaaaagtgacagtgatgatgatgacctgccaaatgtgaccttagatagcgttaatgaaactggatctacggccctttccatagccagagcagtacaagagtaagtatcacattcacaggatgaattaagaattgccaaggtgttcaatggataatggaaactgcagcatctcctgtcccccagccatgtcattctagctgtgaactggcacgaatgtcagcagcttttcattcagctgaatgctctttgggagattagggcagagaatggagtgttttaatgagttggaaattcatgctttgatgagatataagacctatgtgcatcttttctaatacctcctgcacccttctcctgaactctgcaaaaaaaaaaaaattgttatttttgaatgtcactatttgattatcatcatcattattattacacaaagtcaagggaaatatggcaaagtattgttatcttgttttgataggaaattacagaatagctttttggaagatttaaatttggaaaataatatgttcatcctttgaaaagtagtactcatatgttatttttaaatgaatcttttctctgtccttttacctggaccgcagggttagatttcagccctcgtttattgaaaatagctgcttttctatcagtcaaccttgtacctagaattgaacctaaatgattgaaaaaaaaaa

SEQ ID NO: 4 - protein, 402 aa, Homo sapiens
MNIHMKRKTIKNINTFENRMLMLDGMPAVRVKTELLESEQGSPNVHNYPDMEAVPLLLNNVKGEPPEDSLSVDHFQTQTEPVDLSINKARTSPTAVSSSPVSMTASASSPSSTSTSSSSSSRLASSPTVITSVSSASSSSTVLTPGPLVASASGVGGQQFLHIIHPVPPSSPMNLQSNKLSHVHRIPVVVQSVPVVYTAVRSPGNVNNTIVVPLLEDGRGHGKAQMDPRGLSPRQSKSDSDDDDLPNVTLDSVNETGSTALSIARAVQEVHPSPVSRVRGNRMNNQKFPCSISPFSIESTRRQRRSESPDSRKRRIHRCDFEGCNKVYTKSSHLKAHRRTHTGEKPYKCTWEGCTWKFARSDELTRHYRKHTGVKPFKCADCDRSFSRSDHLALHRRRHMLV

SEQ ID NO: 5 - protein, 269 aa, Homo sapiens
MNIHMKRKTIKNINTFENRMLMLDGMPAVRVKTELLESEQGSPNVHNYPDMEAVPLLLNNVKGEPPEDSLSVDHFQTQTEPVDLSINKARTSPTAVSSSPVSMTASASSPSSTSTSSSSSSRLASSPTVITSVSSASSSSTVLTPGPLVASASGVGGQQFLHIIHPVPPSSPMNLQSNKLSHVHRIPVVVQSVPVVYTAVRSPGNVNNTIVVPLLEDGRGHGKAQMDPRGLSPRQSKSDSDDDDLPNVTLDSVNETGSTALSIARAVQE

SEQ ID NO: 6 - DNA, 20 bp, Artificial Sequence
  Synthetic primer sequence
tgcaacactctggttacttc

SEQ ID NO: 7 - DNA, 20 bp, Artificial Sequence
  Synthetic oligonucleotide sequence
gctaactcccaaattgtacc

SEQ ID NO: 8 - DNA, 23 bp, Artificial Sequence
  Synthetic primer sequence
aacactctggttacttcttattt

SEQ ID NO: 9 - DNA, 30 bp, Artificial Sequence
  Synthetic primer sequence
acgttggatgctgactccaagagtcagtaa

SEQ ID NO: 10 - DNA, 30 bp, Artificial Sequence
  Synthetic primer sequence
acgttggatgcacctgatactaggtaattg

SEQ ID NO: 11 - DNA, 30 bp, Artificial Sequence
  Synthetic primer sequence
acgttggatgcagcaaatgcttggtgatac

SEQ ID NO: 12 - DNA, 30 bp, Artificial Sequence
  Synthetic primer sequence
acgttggatgatcaggtgatatgtgtctgc

SEQ ID NO: 13 - DNA, 30 bp, Artificial Sequence
  Synthetic primer sequence
acgttggatgctctcagagcctttctgaag

SEQ ID NO: 14 - DNA, 30 bp, Artificial Sequence
  Synthetic primer sequence
acgttggatgtacagtcacgtattagtgcc

SEQ ID NO: 15 - DNA, 30 bp, Artificial Sequence
  Synthetic primer sequence
acgttggatgtttcaaaacgccctttcatc

SEQ ID NO: 16 - DNA, 31 bp, Artificial Sequence
  Synthetic primer sequence
acgttggatggggtcaatactacctattgtg

SEQ ID NO: 17 - DNA, 30 bp, Artificial Sequence
  Synthetic primer sequence
acgttggatggggtcttttcaagataggcc

SEQ ID NO: 18 - DNA, 30 bp, Artificial Sequence
  Synthetic primer sequence
acgttggatgcagtcacctgctttttgctc

SEQ ID NO: 19 - DNA, 30 bp, Artificial Sequence
  Synthetic primer sequence
acgttggatggaagtcatcattaccatggc

SEQ ID NO: 20 - DNA, 30 bp, Artificial Sequence
  Synthetic primer sequence
acgttggatgctgtagtttagtggtgcttc

SEQ ID NO: 21 - DNA, 31 bp, Artificial Sequence
  Synthetic primer sequence
acgttggatgcaacactcttaggtttcaagg

SEQ ID NO: 22 - DNA, 30 bp, Artificial Sequence
  Synthetic primer sequence
acgttggatgctcttagttatcgagtagcc

SEQ ID NO: 23 - DNA, 30 bp, Artificial Sequence
  Synthetic primer sequence
acgttggatgctgcagggtggtgttacatt

SEQ ID NO: 24 - DNA, 31 bp, Artificial Sequence
  Synthetic primer sequence
acgttggatggaggaggtaaagtcattaaag

SEQ ID NO: 25 - DNA, 30 bp, Artificial Sequence
  Synthetic primer sequence
acgttggatgcacatttggctcaaatgcag

SEQ ID NO: 26 - DNA, 31 bp, Artificial Sequence
  Synthetic primer sequence
acgttggatgctacccttcacattataaacc

SEQ ID NO: 27 - DNA, 30 bp, Artificial Sequence
  Synthetic primer sequence
acgttggatgtcaagggcgtgcaattgtag

SEQ ID NO: 28 - DNA, 30 bp, Artificial Sequence
  Synthetic primer sequence
acgttggatgcagaggaatctgcacaacac

SEQ ID NO: 29 - DNA, 30 bp, Artificial Sequence
  Synthetic primer sequence
acgttggatggcctttttttaagtatggga

SEQ ID NO: 30 - DNA, 30 bp, Artificial Sequence
  Synthetic primer sequence
acgttggatgaggtgagatgattaggcatg

SEQ ID NO: 31 - DNA, 30 bp, Artificial Sequence
  Synthetic primer sequence
acgttggatgaagtaatacagccacagttc

SEQ ID NO: 32 - DNA, 30 bp, Artificial Sequence
  Synthetic primer sequence
acgttggatgaaaagtgggctcaatatctg

SEQ ID NO: 33 - DNA, 31 bp, Artificial Sequence
  Synthetic primer sequence
acgttggatgggttaactttgtggaatggag

SEQ ID NO: 34 - DNA, 30 bp, Artificial Sequence
  Synthetic primer sequence
acgttggatgcgattctttagagaagcgat

SEQ ID NO: 35 - DNA, 30 bp, Artificial Sequence
  Synthetic primer sequence
acgttggatgagactgtatactcaccaagg

SEQ ID NO: 36 - DNA, 30 bp, Artificial Sequence
  Synthetic primer sequence
acgttggatgctctgtctacagggtacatc

SEQ ID NO: 37 - DNA, 30 bp, Artificial Sequence
  Synthetic primer sequence
acgttggatgtgggagtcttcagagtgaac

SEQ ID NO: 38 - DNA, 30 bp, Artificial Sequence
  Synthetic primer sequence
acgttggatgttcctacgcctgcaaatctg

SEQ ID NO: 39 - DNA, 30 bp, Artificial Sequence
  Synthetic primer sequence
acgttggatgagagaataccatcactctgg

SEQ ID NO: 40 - DNA, 30 bp, Artificial Sequence
  Synthetic primer sequence
acgttggatgatcaagatgttgcatcccac

SEQ ID NO: 41 - DNA, 30 bp, Artificial Sequence
  Synthetic primer sequence
acgttggatgagcacagtaggtaagactgc

SEQ ID NO: 42 - DNA, 30 bp, Artificial Sequence
  Synthetic primer sequence
acgttggatgctatccaggtaattccaggg

SEQ ID NO: 43 - DNA, 30 bp, Artificial Sequence
  Synthetic primer sequence
acgttggatggtcttggctgctgagtaaag

SEQ ID NO: 44 - DNA, 30 bp, Artificial Sequence
  Synthetic primer sequence
acgttggatgctcaacttctcagcagcaac

SEQ ID NO: 45 - DNA, 30 bp, Artificial Sequence
  Synthetic primer sequence
acgttggatgaaatcctttgatggctgtcc

SEQ ID NO: 46 - DNA, 30 bp, Artificial Sequence
  Synthetic primer sequence
acgttggatgagagggaaaggtttagcgag

SEQ ID NO: 47 - DNA, 30 bp, Artificial Sequence
  Synthetic primer sequence
acgttggatgaaatccgactgtgccagttc

SEQ ID NO: 48 - DNA, 30 bp, Artificial Sequence
  Synthetic primer sequence
acgttggatgtacaggtgtcgtgtgttgtg

SEQ ID NO: 49 - DNA, 30 bp, Artificial Sequence
  Synthetic primer sequence
acgttggatgccaatacaaagtaggcacac

SEQ ID NO: 50 - DNA, 30 bp, Artificial Sequence
  Synthetic primer sequence
acgttggatgtgcagcaacacatctttagg

SEQ ID NO: 51 - DNA, 30 bp, Artificial Sequence
  Synthetic primer sequence
acgttggatggctactagactgtttctctg

SEQ ID NO: 52 - DNA, 30 bp, Artificial Sequence
  Synthetic primer sequence
acgttggatgcaagtcttcatcgtagtcac

SEQ ID NO: 53 - DNA, 30 bp, Artificial Sequence
  Synthetic primer sequence
acgttggatgggcattgacaggctaaatgc

SEQ ID NO: 54 - DNA, 30 bp, Artificial Sequence
  Synthetic primer sequence
acgttggatgggtacaatttgggagttagc

SEQ ID NO: 55 - DNA, 30 bp, Artificial Sequence
  Synthetic primer sequence
acgttggatgtgcaacactctggttacttc

SEQ ID NO: 56 - DNA, 30 bp, Artificial Sequence
  Synthetic primer sequence
acgttggatggctaactcccaaattgtacc

SEQ ID NO: 57 - DNA, 30 bp, Artificial Sequence
  Synthetic primer sequence
acgttggatgccaccagttagttctagatc

SEQ ID NO: 58 - DNA, 30 bp, Artificial Sequence
  Synthetic primer sequence
acgttggatggcaatgcaacaacatgcaag

SEQ ID NO: 59 - DNA, 30 bp, Artificial Sequence
  Synthetic primer sequence
acgttggatgtacagagcttgacaaaaggc

SEQ ID NO: 60 - DNA, 31 bp, Artificial Sequence
  Synthetic primer sequence
acgttggatgctacaaaatgagaggttaatc

SEQ ID NO: 61 - DNA, 30 bp, Artificial Sequence
  Synthetic primer sequence
acgttggatgtcttcttcagttggtcagtg

SEQ ID NO: 62 - DNA, 30 bp, Artificial Sequence
  Synthetic primer sequence
acgttggatgaataacaagtgcagaggccc

SEQ ID NO: 63 - DNA, 30 bp, Artificial Sequence
  Synthetic primer sequence
acgttggatgcaccccctccactagaatat

SEQ ID NO: 64 - DNA, 30 bp, Artificial Sequence
  Synthetic primer sequence
acgttggatggcactgtatccatcagacac

SEQ ID NO: 65 - DNA, 30 bp, Artificial Sequence
  Synthetic primer sequence
acgttggatgcccataatcctggcacatta

SEQ ID NO: 66 - DNA, 30 bp, Artificial Sequence
  Synthetic primer sequence
acgttggatgtggtagtctctgaagtgagg

SEQ ID NO: 67 - DNA, 30 bp, Artificial Sequence
  Synthetic primer sequence
acgttggatgtgtttcattgcacacttccc

SEQ ID NO: 68 - DNA, 30 bp, Artificial Sequence
  Synthetic primer sequence
acgttggatgatgccaggacccatcaatag

SEQ ID NO: 69 - DNA, 30 bp, Artificial Sequence
  Synthetic primer sequence
acgttggatgaactattgatgggtcctggc

SEQ ID NO: 70 - DNA, 30 bp, Artificial Sequence
  Synthetic primer sequence
acgttggatgggagatgccagattcattac

SEQ ID NO: 71 - DNA, 30 bp, Artificial Sequence
  Synthetic primer sequence
acgttggatggtaatgaatctggcatctcc

SEQ ID NO: 72 - DNA, 31 bp, Artificial Sequence
  Synthetic primer sequence
acgttggatggtaatagtgcaaatgcctgtc

SEQ ID NO: 73 - DNA, 30 bp, Artificial Sequence
  Synthetic primer sequence
acgttggatgtgaatctggcatctcccatg

SEQ ID NO: 74 - DNA, 31 bp, Artificial Sequence; identical to SEQ ID NO: 72
  Synthetic primer sequence

SEQ ID NO: 75 - DNA, 30 bp, Artificial Sequence
  Synthetic primer sequence
acgttggatgtcctttgaaaagtagtactc

SEQ ID NO: 76 - DNA, 30 bp, Artificial Sequence
  Synthetic primer sequence
acgttggatgtgaaatctaaccctgcggtc

SEQ ID NO: 77 - DNA, 30 bp, Artificial Sequence
  Synthetic primer sequence
acgttggatgacagaatagctttttggaag

SEQ ID NO: 78 - DNA, 30 bp, Artificial Sequence
  Synthetic primer sequence
acgttggatgcggtccaggtaaaaggacag

SEQ ID NO: 79 - DNA, 30 bp, Artificial Sequence
  Synthetic primer sequence
acgttggatgaaacactccattctctgccc

SEQ ID NO: 80 - DNA, 30 bp, Artificial Sequence
  Synthetic primer sequence
acgttggatgttctagctgtgaactggcac

SEQ ID NO: 81 - DNA, 30 bp, Artificial Sequence
  Synthetic primer sequence
acgttggatgtcagaacattgtgccgtttc

SEQ ID NO: 82 - DNA, 30 bp, Artificial Sequence
  Synthetic primer sequence
acgttggatgtgctcttgaactctatcctg

SEQ ID NO: 83 - DNA, 30 bp, Artificial Sequence
  Synthetic primer sequence
acgttggatgcttgtactggaaagtagccc

SEQ ID NO: 84 - DNA, 30 bp, Artificial Sequence
  Synthetic primer sequence
acgttggatgggaggatcttgagtcctttc

SEQ ID NO: 85 - DNA, 30 bp, Artificial Sequence
  Synthetic primer sequence
acgttggatgccaaagctttacgcttctcc

SEQ ID NO: 86 - DNA, 30 bp, Artificial Sequence
  Synthetic primer sequence
acgttggatggactctggaggaagtcttac

SEQ ID NO: 87 - DNA, 22 bp, Artificial Sequence
  Synthetic primer sequence
ccctatactagaaaagtcacca

SEQ ID NO: 88 - DNA, 20 bp, Artificial Sequence
  Synthetic primer sequence
cattaaagttcctgcttgac

SEQ ID NO: 89 - DNA, 21 bp, Artificial Sequence
  Synthetic primer sequence
agcctttctgaagaagacaag

SEQ ID NO: 90 - DNA, 21 bp, Artificial Sequence
  Synthetic primer sequence
gaaattcacaaccaacccttg

SEQ ID NO: 91 - DNA, 23 bp, Artificial Sequence
  Synthetic primer sequence
agataggcctttataaacccttt

SEQ ID NO: 92 - DNA, 21 bp, Artificial Sequence
  Synthetic primer sequence
ccatggctaatagagaatgtg

SEQ ID NO: 93 - DNA, 19 bp, Artificial Sequence
  Synthetic primer sequence
ttaggtttcaaggagaatg

SEQ ID NO: 94 - DNA, 23 bp, Artificial Sequence
  Synthetic primer sequence
cctccaaattctcatcttttctt

SEQ ID NO: 95 - DNA, 20 bp, Artificial Sequence
  Synthetic primer sequence
tgcaagaaagagtggcaaat

SEQ ID NO: 96 - DNA, 22 bp, Artificial Sequence
  Synthetic primer sequence
gcaattgtaggaaggtaaataa

SEQ ID NO: 97 - DNA, 22 bp, Artificial Sequence
  Synthetic primer sequence
tttttaagtatgggaagatgat

SEQ ID NO: 98 - DNA, 20 bp, Artificial Sequence
  Synthetic primer sequence
aactttgtggaatggagtaa

SEQ ID NO: 99 - DNA, 23 bp, Artificial Sequence
  Synthetic primer sequence
taaacaaatacagatattgagcc

SEQ ID NO: 100 - DNA, 24 bp, Artificial Sequence
  Synthetic primer sequence
aaacttttgattattcattcgatt

SEQ ID NO: 101 - DNA, 20 bp, Artificial Sequence
  Synthetic primer sequence
aacattatgacagacctgtt

SEQ ID NO: 102 - DNA, 24 bp, Artificial Sequence
  Synthetic primer sequence
gttttcaatgttttcataaaccta

SEQ ID NO: 103 - DNA, 19 bp, Artificial Sequence
  Synthetic primer sequence
ctgcaggctctgtagagca

SEQ ID NO: 104 - DNA, 22 bp, Artificial Sequence
  Synthetic primer sequence
ctgagtaaagaagctgttcaag

SEQ ID NO: 105 - DNA, 20 bp, Artificial Sequence
  Synthetic primer sequence
aaccatttaccacaacacac

SEQ ID NO: 106 - DNA, 17 bp, Artificial Sequence
  Synthetic primer sequence
gtgccagttccaatctt

SEQ ID NO: 107 - DNA, 20 bp, Artificial Sequence
  Synthetic primer sequence
ggcacacattacatactgtt

SEQ ID NO: 108 - DNA, 22 bp, Artificial Sequence
  Synthetic primer sequence
gggtgctggcattgacaggcta

SEQ ID NO: 109 - DNA, 22 bp, Artificial Sequence
  Synthetic primer sequence
gacaggctaaatgctaagtgac

SEQ ID NO: 110 - DNA, 23 bp, Artificial Sequence
  Synthetic primer sequence
aacactctggttacttcttattt

SEQ ID NO: 111 - DNA, 21 bp, Artificial Sequence
  Synthetic primer sequence
tgtatggaatcgtgttctttt

SEQ ID NO: 112 - DNA, 23 bp, Artificial Sequence
  Synthetic primer sequence
caaaatctgtgaaacatagttat

SEQ ID NO: 113 - DNA, 24 bp, Artificial Sequence
  Synthetic primer sequence
gtgaaattgttcatttactctttg

SEQ ID NO: 114 - DNA, 21 bp, Artificial Sequence
  Synthetic primer sequence
ccactagaatattaagcacca

SEQ ID NO: 115 - DNA, 20 bp, Artificial Sequence
  Synthetic primer sequence
ggcacattaaaagatgcttc

SEQ ID NO: 116 - DNA, 19 bp, Artificial Sequence
  Synthetic primer sequence
tgtttacacatgcacattc

SEQ ID NO: 117 - DNA, 17 bp, Artificial Sequence
  Synthetic primer sequence
cctggcattctagggct

SEQ ID NO: 118 - DNA, 20 bp, Artificial Sequence
  Synthetic primer sequence
atctggcatctcccatgata

SEQ ID NO: 119 - DNA, 18 bp, Artificial Sequence
  Synthetic primer sequence
catctcccatgatacaca

SEQ ID NO: 120 - DNA, 24 bp, Artificial Sequence
  Synthetic primer sequence
ctttgaaaagtagtactcatatgt

SEQ ID NO: 121 - DNA, 20 bp, Artificial Sequence
  Synthetic primer sequence
gttcatcctttgaaaagtag

SEQ ID NO: 122 - DNA, 19 bp, Artificial Sequence
  Synthetic primer sequence
cattctctgccctaatctc

SEQ ID NO: 123 - DNA, 22 bp, Artificial Sequence
  Synthetic primer sequence
ttcctgctttggcaaattcacg

SEQ ID NO: 124 - DNA, 17 bp, Artificial Sequence
  Synthetic primer sequence
aagtagcccatgaggtc

SEQ ID NO: 125 - DNA, 17 bp, Artificial Sequence
  Synthetic primer sequence
cctcaaatgccacctac

SEQ ID NO: 126 - DNA, 30 bp, Artificial Sequence
  Synthetic primer sequence
acgttggatggctgaatctttctctctccc

SEQ ID NO: 127 - DNA, 30 bp, Artificial Sequence
  Synthetic primer sequence
acgttggatgtgttttgactctgactgccg

SEQ ID NO: 128 - DNA, 30 bp, Artificial Sequence; identical to SEQ ID NO: 79
  Synthetic primer sequence

SEQ ID NO: 129 - DNA, 30 bp, Artificial Sequence
  Synthetic primer sequence
acgttggatgtgtgaactggcacgaatgtc

SEQ ID NO: 130 - DNA, 30 bp, Artificial Sequence
  Synthetic primer sequence
acgttggatgaggaccattaggatatcacc

SEQ ID NO: 131 - DNA, 30 bp, Artificial Sequence
  Synthetic primer sequence
acgttggatgtccaaatagggcaaatggtc

SEQ ID NO: 132 - DNA, 30 bp, Artificial Sequence; identical to SEQ ID NO: 35
  Synthetic primer sequence

SEQ ID NO: 133 - DNA, 30 bp, Artificial Sequence
  Synthetic primer sequence
acgttggatgtctgtctacagggtacatcc

SEQ ID NO: 134 - DNA, 19 bp, Artificial Sequence
  Synthetic oligonucleotide sequence
tctctctcccttctattct

SEQ ID NO: 135 - DNA, 22 bp, Artificial Sequence
  Synthetic oligonucleotide sequence
ctccattctctgccctaatctc

SEQ ID NO: 136 - DNA, 18 bp, Artificial Sequence
  Synthetic oligonucleotide sequence
attgggctggggagttct

SEQ ID NO: 137 - DNA, 22 bp, Artificial Sequence
  Synthetic oligonucleotide sequence
acttttgattattcattcgatt

SEQ ID NO: 138 - RNA, 21 nt, Artificial Sequence
  Synthetic oligonucleotide sequence
aagggucuccaaacguccaca

SEQ ID NO: 139 - RNA, 21 nt, Artificial Sequence
  Synthetic oligonucleotide sequence
aaguaucacauucacaggaug

SEQ ID NO: 140 - RNA, 21 nt, Artificial Sequence
  Synthetic oligonucleotide sequence
aaugccacaguacaccagucg

SEQ ID NO: 141 - DNA, 23 bp, Artificial Sequence
  Illustrative polynucleotide sequence
  misc_feature (3)..(21): n is a, c, g, or t
aannnnnnnnnnnnnnnnnnntt
